(19) United States
(12) Patent Application Publication
(10) Pub. No.: US 2008/0044916 A1
(43) Pub. Date: Feb. 21, 2008

(54) Computational selection of probes for localizing chromosome breakpoints

(76) Inventors: Peter K. Rogan, Overland Park, KS (US); Joan Knoll, Overland Park, KS (US)

Correspondence Address: ERICKSON & KLEYPAS, L.L.C., 800 W. 47TH STREET, SUITE 401, KANSAS CITY, MO, 64112, US

(21) Appl. No.: 11/091,860

(22) Filed: Mar. 28, 2005

Related U.S. Application Data
(60) Provisional application No. 60/557,007, filed on Mar. 26, 2004.

(51) Int. Cl. G01N 33/00; C07H 21/04

(52) U.S. Cl. 436/94; 536/24.3

(57) ABSTRACT

The present invention provides a novel method for selecting genomic hybridization probes. The method generally includes the step of selecting a genomic interval of interest, identifying at least one potential hybridization probe that has known coordinates within the interval of interest, applying a numerical method to sample the identified probe(s) based on its genome coordinates, and selecting a probe based on the result of the numerical method.

### RELATED APPLICATIONS

[0001] This application claims the benefit of provisional application Ser. No. 60/557,007 filed on Mar. 26, 2004, the teachings and content of which are incorporated by reference herein. Additionally, the teachings and content of Document Disclosure No. ______, filed on Jan. 17, 2004, are specifically incorporated by reference herein.

### GOVERNMENT INTEREST

[0002] This invention was made with Government support under grant CA 095167 from the National Institutes of Health. The United States Government may have certain rights specifically with regard to the single copy probes described in the claimed invention.

### BACKGROUND OF THE INVENTION

[0003] One common cause of cancer and other genetic disorders in plants and animals is the rearrangement of chromosomes. For example, a genetic sequence usually found in one chromosome is instead translocated to a different chromosome. Despite knowledge of the role these rearrangements play, no previously available methods have been suitable for the throughput and scale of a large scale project such as the Human Cancer Genome Project. (White Paper, Recommendation for a Human Cancer Genome Project, Report of Working Group on Biomedical Technology, U.S. National Cancer Institute Advisory Board, February 2005, the teachings and content of which are hereby incorporated by reference herein). In that White Paper, it was admitted that currently available methods for detecting chromosomal rearrangements suffer from a multitude of problems. For example, multi-color fluorescent hybridization requires whole cell preparations, not just genomic DNA and has relatively low resolution, while shotgun sequencing of paired ends from large DNA fragments is too costly for large-scale application.

[0004] In addition to the problems noted above, detection of such chromosomal rearrangements has traditionally required the identification of recombinant DNA clones that contain the rearrangement. Such clones are derived from genetic libraries created from a patient's DNA. This procedure involves identification of clones containing sequences on each side of the break. In the case of cancer, this usually involves selection of clone from two different genes that have fused. Typically, probes for this procedure are selected based on restriction sites; the order of the sites is either mapped within a clone or based on sequences specifically known to contain one or more exons that were previously identified by hybridization to a cDNA segment. This enables identification of genomic clones containing a breakpoint, but will not localize the breakpoint within the clone. To achieve higher resolution, it is necessary to use sub-sequences from the probes to determine the location of the breakage interval within the clone. In molecular genetic approaches, breakpoints are identified by length variation in restriction products using Southern analysis or by examination of PCR products of abnormal size or composition. The selection of probes is not generally based on genome coordinates, but is rather based on local coordinates within the clone or other distinguishing features within the clone, gene, or GenBank accession number, which serve as landmarks for sequence mapping.

[0005] Recombinant genomic clones or even fragments derived from such clones spanning a chromosome breakpoint can detect the presence of a chromosome rearrangement (for example, see U.S. Pat. No. 6,576,421 and U.S. Pat. No. 6,344,315, the teachings and content of which are hereby incorporated by reference herein). However, these methods do not provide adequate resolving power to delineate the location of the breakpoint interval at high resolution. Additionally, the prior art does not teach the determination of genomic coordinates of the breakpoint interval, because the sequences of such genomic clones were not mapped precisely onto the genome reference sequence. Other prior art methods use genomic probes that may directly hybridize to chromosomes in order to detect rearrangements, but these methods do not map such probes onto genome reference coordinates, nor do they determine the intervals containing the juxtaposed genomic sequences.

[0006] Another prior art method of detecting breakpoints involves using cDNA to localize breakpoints or breakpoint intervals within a gene to a particular exon, but not to the genome itself. This involves determining the genomic locations of sequence defined sub-segments based on their sequence homology to the cDNA segment by either fluorescent in situ hybridization (FISH), Southern or array comparative genomic hybridization. This provides an indirect assignment of the approximate location of the breakpoint, since the abnormal pattern of hybridization to the chromosomal sequences will delineate which exons in the mRNA that is derived from the chromosome are found in their normal context. It does not reveal the genomic coordinates or distances between genomic segments that hybridize to different portions of the cDNA. However, this method does not determine the coordinates of the breakpoint in the chromosome. This is because adjacent exons may be widely separated by large introns in eukaryotic genomes (see U.S. Pat. No. 6,040,140 to Croce et al., the teachings and content of which are hereby incorporated by reference herein). Thus, the range of coordinates defining the breakage interval may be so large that it has little utility in defining breakpoints. For example, it is not uncommon in the human and murine genomes for entire genes to be nested within the introns of other genes. The failure to delineate the genomic interval of breakage at high resolution using cDNA sub-sequences as probes introduces ambiguity into the determination as to whether the original gene or its nested counterpart is disrupted by a chromosome rearrangement.

[0007] Another prior art method for breakpoint delineation involves amplification-based approaches such as vectorette and pan-handle polymerase chain reaction (for example, see U.S. Pat. No. 6,368,791, the teachings and content of which are hereby incorporated by reference herein) to identify sequences at the junctions of chromosome rearrangements. These methods enable the retrieval of a previously unknown genomic sequence adjacent to a known sequence. However, they require that the known sequence occur within several kilobase pairs of the unknown sequence. Thus, these methods do not provide a means of defining a breakpoint using multiple probes over longer genomic distances. The site of chromosomal rearrangements can be inferred if the known sequence is juxtaposed with an unknown sequence that is derived from a different chromosome or a novel location on the same chromosome. The position of the junction is inferred by comparison of the sequence carrying the rearrangement with the corresponding sequence from the normal reference genome. These procedures do not require prior knowledge of the coordinates of the genomic segment.

[0008] Accordingly, methods for detecting the precise genomic location of breakpoints within a chromosome are needed in the art. Moreover, methods for efficiently selecting probes to be used in such methods are also needed in order to minimize the number of probes used to define a breakpoint location or interval.

### SUMMARY OF THE INVENTION

[0009] The present invention solves the problems inherent in the prior art and provides a distinct advance in the state of the art by providing methods for localization of genomic intervals containing the boundaries of genomic rearrangements. By delineating these boundaries, it is possible to determine precisely the nature of a chromosome abnormality in a patient with an inherited or acquired genomic disorder, to identify the boundaries of polymorphic segments in normal individuals that differ in copy number, or to reveal the genetic basis for pathogenic or nonpathogenic traits in plants (see, B. McClintock, The Origin and Behavior of Mutatable Loci in Maize, 36(6) PNAS, 344-355 (1950) and E. D. Badaeva, Molecular Cytogenetic Analysis of Tetraploid and Hexaploid Aegilops Crassa, 6(8) Chromosome Res., 629-637 (1998), the teachings and content of which are hereby incorporated by reference) or animals See, C. Herens, Cytogenetic Changes in Hepatocarcinomas from Rats Treated with Chronic Exposure to Diethylnitrosamine, 60(1) Cancer Genet Cytogenet., 45-52, (1992), especially in inbred laboratory strains or breeding stock (see M. Liyanage et al., Multicolour Spectral Karotyping of Mouse Chromosomes, 14(3) Nat. Genet., 312-315 (1996), the teachings and content of which are hereby incorporated by reference). The nature of the abnormality can reveal missing or extra copies of individual or multiple genes, defined as partial aneuploidy found in unbalanced chromosome rearrangements or the intervals bracketing balanced chromosome rearrangements, typically found in translocations or inversions that disrupt one or more genes within the breakpoint intervals. In some instances, the rearrangements can even disrupt the regulatory sequences that control the expression or developmental program of genes (rather than the gene itself), thereby disrupting the timing or tissue specificity of gene expression.

[0010] The present invention exploits the coordinates of genomic probes in genome reference sequences to provide methods of selecting probes for delineation of those intervals that are adjacent to a chromosome breakpoint. It is not necessary to have a complete genome reference sequence in order to practice this invention, only a complete sequence of a particular region within which the boundary of the rearrangement resides. The invention selects probes that bracket this particular chromosomal interval containing a breakpoint by first identifying a series of potential probes in the genomic region containing the breakpoint. This region may span millions of nucleotides in length, for example, covering a chromosomal band in the human genome, and therefore numerous probes may be used to define the location of the break. Next, the instant invention provides a means of selecting amongst the universe of potential probes in order to efficiently and quickly narrow the breakpoint to a small interval. Even if the specific breakpoint sequence is not ultimately determined, by limiting the breakpoint interval to a region of up to approximately 25 kilobase pairs (see Example 1), it is often feasible to determine from available genome annotation precisely which gene or genes has been disrupted and the approximate location within the gene where the break has occurred. This information can be valuable in predicting either the clinical phenotype of a patient or the degree to which the gene function may be impaired in an animal or plant model or strain. In some preferred forms of the present invention, the interval of interest or target region is associated with a known chromosomal breakpoint.

[0011] In carrying out the methods of the present invention, computational procedures for localizing the intervals or sites containing chromosomal breaks are used. These procedures will assist in minimizing the number of assays required to define small genomic intervals containing chromosomal breakpoints or rearrangements. Another advantage of the present invention lies in the use of probes that are precisely defined in terms of location within the human genome reference sequence. Once the interval within which a break occurs has been localized, the sequences of the breakpoints can be determined to single nucleotide resolution by conventional molecular biological methods such as panhandle PCR and DNA sequencing.

[0012] In general, the present invention provides a method of selecting a genomic hybridization probe with the method generally including the steps of selecting a genomic interval of interest, identifying a plurality of potential hybridization probes of known genomic coordinates in the interval of interest, applying a numerical method to sample the plurality of probes based on their genome coordinates, and selecting a probe based on the results of the numerical sampling method. The genomic hybridization probe can be a “single copy” genomic probe wherein “single copy” refers to a sequence which is strictly unique (i.e., which is complementary to one and one only sequence in the corresponding genome) but also covers duplicons and triplicons. Stated otherwise, a “single copy” probe in preferred forms will hybridize to three or less locations in the genome. Preferably, the single copy probes of the invention should have a length of at least about 50 nucleotides, and more preferably at least about 100 nucleotides. Probes of this length are sufficient for Southern blot analyses, bead array suspension hybridization, microarray hybridization, multiplex amplifiable probe hybridization and other hybridization techniques. However, if other analyses such as FISH are employed, the probes should be somewhat longer, i.e., at least about 500 nucleotides, still more preferably at least about 1000 nucleotides in length, even more preferably at least about 1500 nucleotides in length, and still even more preferably at least about 2000 nucleotides in length. Single copy probes are typical of the probes suitable for use with the present invention due to their broad and very dense genomic distribution and well defined unique genomic coordinates. Those of skill in the art will appreciate that smaller probes can provide greater resolution of the precise breakpoint location, provided there is sufficient density of probes within a region of interest or target region. It will also be appreciated that non-single copy probes also find great utility in the present invention, provided that their boundary coordinates, i.e., their endpoint coordinate on each side, are known and defined to specific coordinates in the genome. These non-single copy probes can contain interspersed repetitive sequences as well as single copy stretches of nucleic acids. Such probes may need to have blocking or masking nucleic acids (such as Cₒt−1 DNA) preannealed thereto and used prior to chromosomal or genomic hybridization in order to prevent or reduce cross hybridization of repetitive sequences to other locations in the genome. Moreover, if non-single copy probes are used, it is preferred to also use at least some single-copy probes, because if non single copy probes composed entirely of repetitive sequences are used, the delineation or localization of rearrangements or breakpoints will be difficult due to the inability to assign the hybridization to any particular set of genomic coordinates. For purposes of the present invention, it is also preferable to select probes that do not contain overlapping chromosome coordinates. If probes with overlapping chromosome coordinates are used, it is possible that any results coming therefrom could be ambiguous.

[0013] The ability of the present invention to precisely define a genomic or chromosomal interval containing a breakpoint or rearrangement is dependent upon the density of probes within the region of interest or target region surveyed. Higher resolution and precision are afforded by a sufficiently high density of probes within the region. Prior art recombinant genomic probes, especially those available commercially, are considerably larger (generally between 50 and 600 kilobase pairs) than those typically used with the instant invention. The single copy probes and single copy with interspersed repeat probes of the art are suitable for this method because they are present at adequate densities to precisely localize a chromosomal breakpoint such that the breakpoint itself can be efficiently and quickly determined subsequently by genomic restriction digestion, amplification techniques such as panhandle or vectorette PCR, and dideoxy sequencing of the fragments containing the DNA junction linking two sequences that are ordinarily not colinear on the chromosome.

[0014] Probes are selected within an interval based on numerical methods including mathematical formulae, algorithms, sampling methods, neural network approaches including heuristic Markov models, Gibbs sampling, greedy algorithms, supervised and non-supervised learning methods, information theory based models of protein binding sites within genomic sequences, and the like, that determine the location of the probe to choose. Despite the considerably higher resolution of the instant method, it is not always feasible to select a probe precisely at the coordinate computed by the numerical method because the preferred set of coordinates occurs within a long stretch of highly reiterated sequences. In such instances, the closest or nearest single copy probe or combination of multiple single copy and interspersed repeat probes is instead selected. The results of applying those numerical methods produce a result, ie. whether the probe signal remains on the original portion of the chromosome (as defined by the presence of the original centromere) or if it is missing from that normal context due to, for example, either deletion, translocation to another chromosome, or it appears at a different location on the same chromosome due to translocation or inversion. Another possibility is that there is local amplification of the sequence in the same chromosomal domain or additional copies amplified in a new chromosomal context. If the probe detects the chromosomal sequence on the original portion of the chromosome, ie. the derivative chromosome, the probe is said to stay (st) on this chromosome (this is an expected result). If it occurs elsewhere on the chromosome or on other chromosomes, it is said to move (mv). If a copy of the sequence is missing from the genome, the probe is said to be deleted (del) or if the break occurs with a probe or set of probes, then the probe(s) are said to split (spl) or separate (sep). Additional copies of the probe are indicated with the number of copies detected (eg. ×2 for two copies).

[0015] As each probe (or probe combination) is tested, preferred methods of the present invention score probes for the expected (st) versus the other possible outcomes (mv, del, spl, add). The breakpoint is delineated by probes that are collinear in a normal chromosome but have discordant outcomes when hybridized to chromosomes from a patient that harbors a chromosome rearrangement. The objective of the method is to hybridize a series or combination of probes that are colinear in normal individuals and to progressively, iteratively apply closer to one another on normal chromosomes so as to delineate the smallest possible pair of intervals with discordant scoring patterns.

[0016] A plurality of numerical or mathematical methods can be used to select probes to localize chromosomal breaks. All of these strategies have in common the requirement to identify one or more probes with discordant chromosomal scoring patterns. The instant invention teaches that certain numerical approaches may be more efficient, depending the number of breakpoint intervals that have been previously ascertained. The selection of probes based on prior probability of a breakpoint occurring within a particular interval requires that there have already been observations of breaks within that interval. In the absence of such information, it is more appropriate to apply numerical methods that select probes based on genome coordinates alone which progressively reduce the size of the interval bounded by probes with discordant chromosomal scoring patterns. Examples are provided of bisection and golden ratio section methods which dictate the locations of probes based on well established numerical formulae. It is important to note that none of the methods of the instant invention saturate the testing of the chromosomal interval with all of the available probes, as this would be an extremely inefficient approach to delineating the chromosomal breakpoint interval.

[0017] The present invention is also advantageous because it is based on the coordinates of known genomic sequences. Therefore, it is feasible to determine the maximum and possible minimum size of the genomic interval with greater precision than is feasible with commercially available or other recombinant probes typically used for chromosomal hybridization. Another advantage is that numerical methods based on the chromosomal coordinates themselves for bracketing the breakpoint interval can be applied to determine the order of probes used to more narrowly delineate the interval. Linear minimization methods for determining shortest paths are well known in computer science and other applied mathematical applications, but heretofore have not been anticipated or applied towards chromosomal localization of breakpoints, despite the admitted problems inherent with the prior art approaches.

[0018] In preferred forms, once the probe or probes have been selected based on the numerical methods, the general method further includes the step of hybridizing the selected probe with the selected interval.

[0019] In practice, the numerical method selected for use with the present invention can be any method that helps to select a probe for use in delineating the interval within which a breakpoint or rearrangement occurs, and thereby avoids the “brute-force” approach of using every available probe within an interval to delineate the interval containing the breakpoint or rearrangement. Some preferred methods include the general bisection method, dichotomous (divides into equal parts) bisection method, golden section ratio method, combinatorial bracketing, cumulative probability, and combinations thereof.

[0020] One preferred numerical method is referred to as the bisection method of probe selection. In the bisection method, an interval is selected and is divided into two nearly-even sections. A probe near the bisection coordinate is selected for hybridization and then, in cytogentic applications of balanced chromosome rearrangements, it is determined whether the probe moves or stays. The results of this hybridization will determine which interval is next selected for a second bisection. In the situation involving deletions or amplifications (partial aneuploidies), only probes that are present that are not deleted can be scored and the abnormality is detected by determining how many hybridization signals are present. For context independent hybridization methods, such as microarrays, bead array suspension, Southern blotting, and multiplex amplifiable probe hybridization, the ratio of intensities for deleted versus non-deleted loci is used to score the results of the experiment. However, the computational method of selecting the probes for these context independent methods is indistinguishable from the techniques used for cytogenetic (e.g. FISH) probe selection.

[0021] A variation of the bisection method involves a two point (dichotomous, meaning to divide into 2 parts) search for finding a solution to f(x) in order to determine the location of a chromosome breakpoint. f(x) is a Boolean function. It equals 0 if there is no break detected by the probe—that is, if the probe stays with the original derivative chromosome. It equals 1 if there is a break detected by the probe—that is, if the probe moves to the second derivative chromosome or the probe signal is split or separated (which would indicate that the breakpoint is located in the sequence hybridized by the probe).

[0022] In order to find a solution to minimize f(x), first one selects a chromosomal interval with known endpoints a and b. The first probe selected will be x1, which has a first endpoint that is approximately equal to a+(b−a)/2−ε/2, where E is the resolution of the probes. The second probe selected will be x2, which should have a first endpoint that is approximately equal to a+(b−a)/2+ε/2. The two probes are then hybridized to the chromosomal interval and the results examined and plugged into the Boolean function. Then, the solutions to f(x1) and f(x2) are compared. If f(x1)<f(x2), then it can be assumed that the breakpoint is upstream from the first endpoint of x2. The location of the breakpoint can be further determined by examining the interval from a to the first endpoint of x2, repeating the steps above. If f(x1)=f(x2)=0, then the breakpoint must be located downstream from the second endpoint of x2. The location of the breakpoint can be further determined by examining the interval from the second endpoint of x2 to b, repeating the steps above. If f(x1)=f(x2)=1, then the breakpoint interval must be located upstream from the first endpoint of x1. The location of the breakpoint can then be even further determined by examining the interval from a to the first endpoint of x1, repeating the steps above. If f(x1)>f(x2), then the breakpoint must be located downstream from the second endpoint of x1 and upstream from the first endpoint of x2. The location of the breakpoint can be further determined by examining the interval from the second endpoint of x1 to the first endpoint of x2, repeating the steps above. Probes are then ideally continually placed and hybridized in the above manner until (b−a)<2ε, but this may be limited by the availability of single copy probe intervals or samples to test. In Example 2, this method was used to determine the location of a breakpoint between base pairs 124,604,661 and 124,630,536 on human chromosome 9 in the ABL1 oncogene region.

[0023] Another preferred numerical method of probe selection is referred to as the golden section method. The golden section method is similar to the bisection method in that it uses the same Boolean equation f(x) and has the same solutions. However, the calculation for probes x1 and x2 is slightly different. Instead of bisecting a chromosomal interval from a to b, the interval is instead partitioned using the golden ratio. This partition is calculated in the following manner. First, it is noted that b/(a−b)=a/b. This implies that b*b=a*a−ab. Solving this equation for a yields a=(b square root(5))/2. Accordingly, a/b=0.618 or 1.618.

[0024] In accordance with this ratio, probe x1 has a first endpoint that is approximately equal to a+(b−a)*0.382, and probe x2 has a first endpoint that is approximately equal to a+(b−a)*0.618. The probes are then hybridized and the resultant hybridizations are used to solve for the solutions of these equations. The solutions of the functions are then compared with one another. If f(x1)>f(x2), then a new interval is examined between the second endpoint of x1 and b. The methods above are then applied to create two new probes. Mathematically speaking, x1 will equal a in the probe selection equation above, and x2 will equal x1. Accordingly, x2 will equal a+(b−a)*0.618. If f(x1)<f(x2), then a new interval is examined between a and the first endpoint of x2. Mathematically speaking, x2 will equal b in the probe selection equation above, and x1 will equal x2. Accordingly, x1 will equal a+(b−a)*0.382. Probes are then ideally continually placed and hybridized in the above manner until (b−a)<2e, but this may be limited by the availability of probes. In Example 3, this method is used to determine the location of a breakpoint between base pairs 124,632,735 and 124,645,118 on human chromosome 9.

[0025] Another preferred numerical method for the selection of probes to determine breakpoints in a chromosome is referred to as the combinatorial method of probe selection. The combinatorial method relies on a function f(x) that has three possible solutions. This is because the combinatorial method of selection relies on a multitude of probes within a chromosomal interval from a to b. These probes are labeled x1 through xₙ, where n is the total number of probes. The combinatorial method relies on the golden section method for the initial selection of probes. Probe x1 has a first endpoint that is located near a+(b−a)*0.382, and probe xₙ has a first endpoint that is located near a+(b−a)*0.618. Probes x2 through x₍ₙ₋₁₎ are located between x1 and xₙ.

[0026] After the probes have been hybridized, there are three possible solutions to the function f(x). If all of the probes have moved to a different derivative chromosome, then f(x)=2. In this case, the breakpoint must be located downstream or distal from the first endpoint of x1. Accordingly, a new chromosomal interval is examined in the above manner between a and the first endpoint of x1. If after hybridization, all of the probes remain on the original chromosome, then f(x)=0 and the breakpoint must be located downstream from the second endpoint of xₙ. Accordingly, a new chromosomal interval is examined in the above manner between the second endpoint of xₙ and b. In the case of a split or separated signal—that is, some of the probes remain on the original chromosome and some move to a different chromosome, then f(x)=1. Accordingly, a new chromosomal interval is examined in the above manner between the second endpoint of x1 and the first endpoint of xₙ. Probes can continue to be used until a breakpoint is determined within the desired resolution. In Example 4, this method was used to determine the location of a breakpoint between the IVS1b and IVS3 regions of the ABL1 gene on human chromosome 9.

[0027] Yet another preferred numerical method for the selection of probes to determine breakpoints in a chromosome is referred to as the cumulative probability method of probe selection. This method relies on already known breakpoints in a chromosome for a particular disorder in order to find the breakpoint in a particular patient. For example, there have been many breakpoints discovered on human chromosome 9 for patients with chronic myelogenous leukemia (CML). The breakpoints are graphed using a Bayesian function along a chromosomal interval from a to b. Next, a probe x1 is selected that is nearest to the greatest Bayesian maxima in the interval. After hybridization, if probe x1 is determined to have moved to a different chromosome, then the next probe, probe x2, is a probe located nearest the greatest Bayesian maxima between a and the first endpoint of x1. If probe x1 is determined to have remained on the chromosome, then probe x2 is a probe nearest the greatest Bayesian maxima between the second endpoint of x1 and b. Ideally, probes are selected until a breakpoint is determined to at a Bayesian maxima or between two Bayesian maxima. In Example 5, this method is used to determined the location of a breakpoint between nucleotide coordinates 124,623,522 and 124,630,536.

[0028] With all of these methods, a plurality of probes can be selected based on the results of the sampling method. In some preferred forms, the probes can be labeled with a plurality of different types of labels, including different colors. Use of multiple label types or colors can facilitate the hybridization and differentiation of several probes within the same experiment. The probe colors can be entirely different or a combination of different colors can be used to provide different color intensities that indicate the delineation of the breakpoint or rearrangement interval. The colors or color intensities can be deconvoluted by optical filters and measured with a device. Preferred devices include spectrometers, photographic apparatuses, laser detectors, or some combination of different devices.

[0029] When the selected numerical method determines the coordinates of the next probe to select, it is understood that a probe is not always going to be located precisely at the desired coordinate. In such situations, the closest probe to the desired coordinate is selected as the probe. In the examples herein, this is referred to as “near.”

[0030] The present invention finds utility in a variety of hybridization platforms including bead array hybridization, microarray hybridization, fluorescence in-situ hybridization, Southern hybridization, multiplex amplifiable probe hybridization, other probe hybridization techniques, and combinations thereof. Several of these methods permit multiple probes to be analyzed in parallel or rapidly and sequentially while still benefitting from the present invention's teaching of how to select probes in an efficient manner that narrows the breakpoint intervals. FISH techniques are especially suited for examining balanced chromosome rearrangements. Techniques amenable to parallellization will expedite the delineation of breakpoint intervals in patients or specimens with partial aneuploidy.

[0031] Using the methods described herein, a number of hybridization probes were identified between the 5′ genome coordinate of the ASS gene and the 3′ coordinate of the ABL1 gene. These identified probes have been verified and include SEQ. ID Nos. 1, 3-13, and 22-56. Those of skill in the art will understand that these probes were selected from a multitude of potential probes that were within this interval of interest.

[0032] As used herein, “breakpoint” refers to the precise position within a genome at which two DNA sequences that are not collinear in a reference sequence have been juxtaposed and are adjacent to one another. The term “breakpoint interval” signifies a genomic segment separated by a pair of adjacent sequence-defined probes of known coordinates. A “chromosome rearrangement,” by definition, produces one or more chromosome “breakpoints.” “Chromosome rearrangements” can result in deletions, duplications, amplifications, translocations, inversions, insertions or combinations of these chromosome structures that are not typically observed in normal individuals. Chromosome “abnormalities” are distinguished from chromosomal polymorphisms because abnormalities are considered pathogenic by those of skill in the art. Polymorphisms can be found in normal individuals; however, certain polymorphisms can predispose to presence of abnormalities in offspring of those individuals.

### BRIEF DESCRIPTION OF THE DRAWING FIGURES

[0033] The patent or application file contains at least one drawing executed in color. Copies of this patent or patent application publication with color drawing(s) will be provided by the Office upon request and payment of the necessary fee.

[0034] FIG. 1 is a schematic diagram that illustrates the expected results of the prior art versus the expected outcomes of the methods of the present invention;

[0035] FIG. 2 is a schematic diagram illustrating the structure of the BCR and ABL1 genes in normal patients and the translocations of portions of the genes in patients with leukemia;

[0036] FIG. 3 is a schematic diagram of the IVS1B intron of the ABL1 gene illustrating various probes and their coordinates, as well as illustrating part of the experiments of Example 2;

[0037] FIG. 4 is a photograph of the hybridization of probes 20 and 21 to chromosome 9 and derivative chromosome 22;

[0038] FIG. 5 is a photograph of the hybridization of probe 16 to chromosome 9 and derivative chromosome 9;

[0039] FIG. 6 is a photograph of the hybridization of probe 17a to chromosome 9 and derivative chromosome 22;

[0040] FIG. 7 is a photograph of the hybridization of probes 25, 27, and 29 to chromosome 9 and derivative chromosome 22;

[0041] FIG. 8 is a photograph of the hybridization of probes 25, 27, and 29 to chromosome 9 and derivative chromosome 22 and probes 16 and 18 to chromosome 9 and derivative chromosome 9;

[0042] FIG. 9 is a schematic diagram illustrating a color-coded combinatorial labeling method of probe computation;

[0043] FIG. 10 is a schematic drawing and table illustrating the effectiveness of various computational methods of probe selection;

[0044] FIG. 11 is a graph illustrating the distribution of breakpoints in the IVS1B intron of ABL1 on chromosome 9 in 27 leukemia patients; and

[0045] FIG. 12 is a graph illustrating the distribution of known chromosomal breakpoints along the ABL1 gene in chromosome 9.

### DETAILED DESCRIPTION OF THE PREFERRED EMBODIMENTS

[0046] Since certain changes may be made above method without departing from the scope of the invention, it is intended that all matter contained in the above description and shown in the accompanying drawing shall be interpretive as illustrative and not limiting. It is also understood that the following claims are intended to cover all of the generic and specific features of the invention described herein, and all statements of the scope of the invention which, as a matter of a language might be said to fall between.

### Example 1

[0047] This example demonstrates the feasibility of using scFISH probes throughout the human genome and incorporates by reference the teachings and content of Rogan et al., Sequence-Based Design of Single-Copy Genomic DNA Probes for Fluorescence In Situ Hybridization, Genome Research, vol. 11, pp. 1086-1094 (2001). This was accomplished by analyzing the organization of potential single copy probe sequences on chromosomes 21q and 22q. Chromosome 21q contains a lower density of genes than chromosome 22q, and is somewhat more representative of the complete genome. The coordinates of each of the repetitive sequence elements in chromosome 21q and chromosome 22q sequences were located with the computer program CENSOR (as described in Jurka, J., Klonowski, P., Dagman, V., and Pelton, P., “CENSOR—A Program for Identification and Elimination of Repetitive Elements from DNA Sequences”, Computational Chemistry, Vol. 20, pp. 119-122, 1996, which is hereby incorporated by reference). The sequence used for chromosome 21 is available in Hattori et al., “The DNA Sequence of Human Chromosome 21”, Nature, vol. 405, pp. 311-319, 2000, which is hereby incorporated by reference. The sequence used for chromosome 22 is available in Dunham et al., “The DNA Sequence of Human Chromosome 22”, Nature, vol. 402, pp. 489-495, 1999, which is hereby incorporated by reference. The locations and lengths of each intervening interval and the distances separating adjacent intervals were computed using a Perl script (findi.pl). The Perl script was used to deduce and sort the adjacent single-copy intervals by size. These boundaries were deduced by subtracting one nucleotide position from the upstream boundary of a repetitive element and adding one nucleotide position to the downstream boundary of the previous element.

[0048] Another Perl script (probsc.pl) was used to determine the lengths of genomic sequences required to find single copy FISH probes exceeding parametrized lengths that were greater than or equal to 2.3 kb. This program is operated by computing the probability of detecting at least one single-copy interval greater than the specified length in every genomic interval on both chromosomes 21q and 22q. For each single-copy window length, a range of genomic windows was tested up to about 220 kb. The chromosomal single-copy interval distributions were then analyzed with SPSS v. 9.0 (SPSS, Chicago, Ill.). This analysis was used to estimate the resolving power of single copy FISH probes for genome-wide studies. The lengths and distances between intervals were plotted on a log scale and their significance was evaluated with the Kolmogarov-Smimov statistic. In this manner, deviations from a normal distribution were obtained.

[0049] Chromosome 21 was determined to have fewer single copy intervals than chromosome 22, and the intervals are, on average, shorter. Single copy intervals suitable for use as a FISH probe (for purposes of this example, 2.3 kb or more in length) were determined to be separated, on average, by 29.2 kb on chromosome 21 and by 22.3 kb on chromosome 22. Most of the intervals separated by 1.25 kb to 100 kb on chromosome 22 are normally distributed. However, higher numbers of densely clustered and sparsely populated chromosomal regions were more prevalent than expected (p<0.0001) and occur throughout the genome. Next, the probability of detecting at least one single copy sequence in overlapping, uniform-length genomic intervals on chromosomes 21q and 22q was determined. This knowledge determined the size of single copy segments greater than 2 kb in length were found in most 100 kb genomic regions (99% of the time in chromosome 22; 95% of the time in chromosome 21). Segments greater than 1 kb in length are found at least once per 30 kb (more than 99% of the time). A large proportion of the 218-kb genomic internal did not have any single-copy segments greater than about 4 kb in length on either chromosome 21 (62%) or 22 (24%). Since genes containing single copy segments can be found throughout these chromosomes, and chromosome breakage within or adjacent to genes is the basis for phenotypic differences (pathogenic or non-pathogenic), probe length should be selected that will detect chromosome rearrangements in genes with a high degree of confidence (ie. >95%). Therefore, it was determined that single copy FISH probes for these chromosomes should be 2 kb or less in length to ensure comprehensive coverage (at least once per 100-150 kb) of chromosomes 21 and 22 for detecting rearrangements within or adjacent to gene regions. Accordingly, it will be feasible to develop single copy FISH probes capable of high resolution for molecular cytogenetic analysis of most clinically relevant chromosomal rearrangements.

### Example 2

[0050] This example is illustrative of the dichotomous method of bisection of the interval for probe selection using the ABL1 oncogene as an example.

[0051] First, bone marrow samples were selected from 71 persons diagnosed with CML and determined to have a translocation between chromosomes 9 and 22 by cytogenetic GTG-banding. In brief, cells from each sample were prepared and chromosomes were digested with trypsin and then stained using a Giemsa staining procedure. After staining, the cells were visually examined with a microscope to determine whether a translocation was present. A proportion of cells from each patient sample were determined to have a 9; 22 chromosome translocation.

[0052] In patients with CML, sequences distal to intron 1b (IVS1b) of the ABL1 oncogene on chromosome 9 (which is usually disrupted) and have been translocated to the promoter of the BCR gene on chromosome 22. Additionally, approximately 10% of CML patients also have a disruption upstream from the ABL1 oncogene, resulting in a chromosomal deletion on the derivative chromosome 9. This creates a large deletion on the chromosome—at least 300,000 bp—that must be examined to locate a breakpoint. Given that genomic probes range can be as small as about 50 bp, the cost of determining a breakpoint can be high, especially if a comprehensive set of probes covering the whole interval are prepared and tested. Therefore, a way to optimize the selection of probes was necessary so that the overall number of probes required could be reduced.

[0053] A number of probes from within the deletion interval and ABL1 gene (SEQ ID No. 2) were developed to detect small deletions and determine translocation breakpoints. The probes developed focused on known genes with disruptions in SEQ ID No. 2. These probes are provided herein as SEQ ID Nos. 21-36. Of course, not all probes were used for all patient testing as the methods of the present invention, particularly the bisection method, identified the proper probes for each individual patient.

[0054] In this example, dichotomous bisection mapping was used to determine a breakpoint in the ABL1 gene. First, two FISH probes were selected as follows. Using a computer, the sequence of the appropriate sequence of chromosome 9 was identified using the Human Genome database (Build 30, National Center for Biotechnology Information, or Genome browser version hg12, June 2002, the teachings and content of which are hereby incorporated by reference). Next, an mRNA sequence for the chromosomal region was identified and was designated SEQ ID. No. 1. The mRNA sequence was compared to the genomic sequence, and the genomic sequence was designated SEQ ID. No. 2. The computer program RepeatMasker was used to determine the locations of repetitive sequences. The Perl script findi.pl was then used to parse the coordinates of the boundaries of the repetitive segments previously identified using RepeatMasker. Each of these programs can be found in U.S. patent application No. 09,854,867, filed May 14, 2001, or Rogan et al., Genome Research 2001 (cited herein), the teachings and content of which are hereby incorporated by reference. Single-copy intervals with identical upstream and downstream coordinates were determined to be adjacent. Using this process, two probes, designated probe 20 and probe 21, were selected as they were located close to the center of the chromosome span in question, which had endpoints of 124,604,542 and 124,725,532. The nucleotide sequence of probe 20 was designated SEQ ID No. 3 and the sequence of probe 21 was designated SEQ ID No. 4.

[0055] Probes 20 and 21 are single copy probes that were manufactured in the following manner. DNA fragments corresponding to SEQ ID Nos. 3 and 4 were amplified by long Polymerase Chain Reaction (“PCR”) following the procedure in Cheng, et al., “Effective Amplification of Long Targets from Cloned Inserts and Human Genomic DNA”, Proceedings of the National Academy of Sciences, Vol. 91, pp. 5695-5699, 1994, which is hereby incorporated by reference. The long PCR procedure was performed using LA-Taq (Takara Bio, Inc., Japan) as recommended by the manufacturer (Invitrogen, Carlsbad, Calif.). The resulting amplicons were then purified by low-melt temperature agarose gel electrophoresis. This was followed by chromatography with Micro-spin columns (Millipore, Billerica, Mass.), which removed contaminating extension products containing repetitive sequences. The probes were then labeled by nick translation using modified nucleotide digoxigenin-dUTP, or biotin-dUTP, or both (Roche Molecular Biochemicals, Indianapolis, Ind.).

[0056] The labeled probes were then denatured and hybridized to fixed chromosomal preparations on microscope slides using the procedure described in Knoll, J. H. M. and Lichter, P., “In Situ Hybridization to Metaphase Chromosomes Interphase Nuclei”, Current Protocols in Human Genetics, Vol. 1, unit 4.3 (eds. N. C. Dracopoli, et al.), John Wiley, New York, 1994, which is hereby incorporated by reference. However, there is one exception from that procedure. In this example, preannealing of the probe(s) with repetitive DNA (such as C₀t1 DNA) was not necessary and was not used. For several other probes containing repetitive sequences (eg. probes 16-1, 16-2, 16-3, 16a, 17a, 18a, 18b, 21-1, 21-2, 21a, 21b, 21c, 21d, and 21e]), the probes were pre-annealed with Cₒt−1 DNA prior to chromosomal hybridization. Probes containing repetitive sequences are denoted in FIG. 3 in red letters. The probes were hybridized individually or in combination to remove nonspecific binding. Posthybridization washes were performed at 42 degrees C. in 50% formamide in 2×SSC (0.3M NaCl, 0.3M 0.03M sodium citrate, pH7.0), followed by an additional wash at 39 degrees C. in 2×SSC and one in 1×SSC (0.15 M NaCl and 15 mM sodium citrate, pH 7.0) at room temperature. The hybridized probes were detected with a fluorochrome tagged antibody to the modified nucleotide and non-specifically bound antibody was removed by additional washing with 1×SSC, 1×SSC with Triton X100, and 1×SSC again, each at room temperature. Chromosome identification was performed by counterstaining the cellular DNA with 4′,6-diamidino-2-phenylindole (DAPI). The hybridized chromosomes were then viewed with an epifluorescence microscope (Olympus, Melville, N.Y.) equipped with a motorized multiexcitation fluorochrome filter wheel. Hybridization patterns were then scored for each probe. The cells were then imaged using a CCD or analog camera (Cohu, San Diego, Calif.) and CytoVision ChromoFluor software (Applied Imaging, San Jose, Calif.). This image is shown here as FIG. 4. Both probes 20 and 21 were determined to have translocated to the derivative chromosome 22, according to the bracketing sampling method, f(x1)=1. Accordingly, it could be deduced that the breakpoint was located upstream or proximal of probe 20 on chromosome 9.

[0057] Given this information, another probe was selected whose sequence would hybridize near coordinate 124,604,542, the proximal (or centromeric) endpoint of the chromosomal region known to contain breakpoints within ABL1. The coordinates are derived from Build 30 of the NCBI human genome sequence. This probe was designated probe 16 and its sequence corresponded to SEQ ID No. 5. Probe 16 was manufactured in the same manner as probes 20 and 21, and then hybridized to chromosomes in the patient sample in the same manner as probes 20 and 21. The resulting image is shown here as FIG. 5. Probe 16 was determined to have remained in the derivative chromosome 9, meaning that according to the bracketing sampling method, f(x2)=0. Thus, it could be deduced that the breakpoint in the chromosome was downstream from the location of probe 16 and upstream from the location of probe 20, since f(x1) was >f(x2).

[0058] Accordingly, another probe was selected whose sequence would hybridize at about the midpoint between the endpoint of probe 16 and the startpoint of probe 20. This probe was designated 17a and its sequence corresponded to SEQ ID No. 6. Probe 17a was manufactured in the same manner as probes 20 and 21, and then hybridized to chromosomes in the patient sample in the presence of Cot1 DNA, but otherwise in the same manner as probes 20 and 21. The resulting image is shown here as FIG. 6. Probe 17a was determined to have moved to the derivative chromosome 22, meaning that according to the bracketing sampling method, f(x3)=1. Thus, it could be deduced that the breakpoint in the chromosome was downstream from probe 16 and upstream from probe 17a, since f(x3) was >f(x2). Accordingly, the breakpoint in the chromosome lies somewhere in the 26 kb span between base pair 124,604,661 (the end point of probe 16) and 124,630,536 (the start point of probe 17a).

### Example 3

[0059] This example illustrates a hypothetical use of the “Golden Section ratio” method of probe selection in a patient with a chromosome 9 translocation at a known breakpoint at 124,643,186.

[0060] The section of chromosome 9 used in the previous examples and including the ABL1 gene is selected for breakpoint determination. The total number of base pairs in this span of chromosome 9 is 120,990. When this number is multiplied by 0.618, the result is about 74,772. The first endpoint of this chromosome span is located at base pair 124,604,542, and so a probe should be selected that is near base pair 124,679,314. Accordingly, the first probe selected is probe 21 (as described in Example 2), which has a coordinate of approximately 124,684,469 bp. Probe 21 is then manufactured and hybridized to the chromosomes of the sample as described in Example 2. For those probes containing repetitive sequence, Cₒt−1 DNA is preannealed prior to chromosomal hybridization (see FIG. 3). After hybridization, it is determined that the probe has moved to derivative chromosome 22. Therefore, the breakpoint is located upstream from the region corresponding to probe 21. Thus, according to the bracketing sampling method, f(×1)=0.

[0061] Given this information, another probe is selected in the following manner. Again, the total number of base pairs in this interval of chromosome 9 is 120,990. When this number is multiplied by 0.382, the result is 46,218, which corresponds to the distance of the selected probe from one end of the interval. Accordingly, the second probe selected is near base pair 124,650,760 (this is the sum of the endpoint and the computed distance). In accordance with the methods of Examples 1 and 2 above, a probe designated Probe 18a is accordingly selected, which is at base pair 124,645,118 and corresponds to SEQ ID No. 7. This probe is then manufactured and hybridized in accordance with the methods of Example 2. The results indicate that probe 18a moved to derivative chromosome 22, meaning that according to the bracketing sampling method, f(x2)=0. Thus, it could be deduced that the breakpoint in the chromosome was upstream from the location of probes 18a and 21, since f(x2)=f(x1)=0.

[0062] Given this information, it can be assumed that the breakpoint interval lies in between base pair 124,604,542 and base pair 124,645,118-a span of 40,576 base pairs. When this number is multiplied by 0.618, the result is about 25,076. Accordingly, the methods of Examples 1 and 2 are then used to select a probe near base pair 124,629,618. Accordingly, probe 17a (as described in Example 2) is selected, since it begins at base pair 124,630,536. When probe 17a is manufactured and hybridized in accordance with the methods of Example 2, it is determined that probe 17a remains on derivative chromosome 9. Thus, according to the bracketing sampling method, f(x3)=1. Accordingly, the breakpoint must be downstream from probe 17a and upstream from probe 18a, since f(x3)>f(x2). Therefore, the breakpoint is within the chromosome span between base pair 124,632,735 (the endpoint of probe 17a) and base pair 124,645,118.

### Example 4

[0063] This example illustrates the combinatorial method of probe selection.

[0064] The section of chromosome 9 used in the previous examples and including the ABL1 gene was selected for breakpoint determination. Using the methods described in Example 2, above, three probes were selected and were designated probes 25, 27, and 29. The sequence of probe 25 is in the IVS3 region of the ABL1 gene and corresponded to SEQ ID No. 8. The sequence of probe 27 is in the IVS4-6 region of the ABL1 gene and corresponded to SEQ ID No. 9. The sequence of probe 29 is in the IVS11 region of the ABL1 gene and corresponded to SEQ ID No. 10. Probes 25, 27, and 29 were then manufactured and hybridized to the chromosomes of the sample as described in Example 2. The results of this hybridization may be viewed in FIG. 7. This result indicated that all three of these regions had moved to chromosome 23. Therefore, it was determined that the breakpoint was located upstream of region IVS3 of the ABL1 gene.

[0065] In order to further determine the location of the breakpoint, probes 25, 27, and 29 were prepared as noted above and combined with two more probes, probe 16 and probe 18. The sequence of probe 18 was in the IVS1b region of the ABL1 gene and corresponded to SEQ ID No. 11. All 5 probes were then manufactured and hybridized to the chromosomes of the sample as described in Example 2. The results of this hybridization may be viewed in FIG. 8. Again, probes 25, 27, and 29 hybridized to their respective sequences on the translocated chromosome 22 (also known as the “Philadelphia chromosome”), indicating that all three of these probes are downstream of the breakpoint. However, both probes 16 and 18 were hybridized to derivative chromosome 9. To determine whether the chromosome breakage event occurred in the interval separating probes 16 and 18 or the interval separating probes 18 and 25, probe 18 was hybridized individually to the patient's chromosomes. Probe 18 was found to hybridize to the derivative chromosome 9, rather than the translocated chromosome 22 (as well as to the normal copy of chromosome 9 in cells, as expected). Accordingly, it was deduced that the breakpoint was located between probe 18 which occurs within IVS1b and probe 25 which occurs within IVS3 of the ABL1 gene. This interval is bounded by coordinates 124647340 and 124750114 of chromosome 9. It can be appreciated by those of skill in the art that iterative hybridization of additional probes within this region (18a, 18b, 19, 20, 21, 21-1 21-2, 21a, 21b, 21c, 21d, 21e, 22, 23, and 24) either individually or combinatorially, will narrow the breakage interval further so that the breakpoint can be directly identified using, for example, the techniques described in Example 7.

[0066] Using this method, there are several means with which the breakpoints can be determined using a probe “cocktail” as described above. One means is to simply use probes that are each tagged with a different color, antigen, or label or mixtures of these colors, antigens or labels. The mixtures or individual tags can be optically separated with appropriate filters as is well known by those of skill in the art. Another means of doing so is to use “color-coded” labeling, as can be seen in FIG. 9. For example, given four probes (x1, x2, x3, and x4), then two colors can be used, such as red and green, to define a translocation breakpoint. The red color would be obtained, for example, by labeling probe DNA by nick translation with biotinylated-dUTP, dGTP, dATP, and dCTP, and detecting the incorporated biotinylated nucleotides with streptavidin conjugated to rhodamine. The green color would be obtained by labeling probe DNA by nick translation with digoxigenin-dUTP, dGTP, dATP, and dCTP and detecting the incorporated digoxigenin modified nucleotides with anti-digoxigenin antibody conjugated with fluorescein. Each x1 probe would be labeled red. The x2 and x3 probes would each consist of mixtures of the biotinylated and digoxigenin labeled DNA. Two-thirds of each x2 probe would be labeled red and the other third of each x2 probe would be labeled green. One-third of each x3 probe would be labeled red and the other two-thirds would be labeled green. Finally, every x4 probe would be labeled green. If all of the probes were simultaneously hybridized to the chromosome, the breakpoint interval can be determined by integrating the color intensity in the resultant chromosomes. For example, if the break is between probes x2 and x3, then derivative chromosome 22 will have an integrated intensity of 33 red:166 green, and derivative chromosome 9 will have an integrated intensity of 166 red: 33 green. The integrated red:green intensities of the resultant chromosome(s) essentially determine which probes have hybridized to a particular chromosome. In the case of a deletion, only one chromosome hybridization will be evident, but the integrated intensity of probe signals of the remaining chromosome can be used to infer the breakpoint interval. The interpretation of these results is distinguished from prior art methods, since each of the probes having defined coordinates and the combination of integrated intensities, therefore delineate a range of coordinates within which the breakpoint resides.

### Example 5

[0067] This example uses cumulative Prior probability distribution of known breakpoints to select probes for subsequent patient studies. This is a hypothetical example illustrating the method as it might be applied to a breakpoint in chromosome 9 at approximately 124,625,000.

[0068] A section of chromosome 9 spanning 120,990 nucleotides from coordinates 124,604,542 through 124,725,532 and including the ABL1 gene is selected for breakpoint determination. Using the methods described in Example 2, a probe designated 21d is selected. Probe 21d corresponds to SEQ ID No. 12 and is located at base pair 124,719,970, which is located near one of the Bayesian maxima as can be seen in FIG. 12. Probe 21d is manufactured and hybridized using the methods of Example 2. After hybridization, it is determined that probe 21d had moved to derivative chromosome 22, meaning that the breakpoint was located upstream from bp 124,719,970.

[0069] Accordingly, probe 18a (as described in Example 3) is then selected, since it is located near another Bayesian maxima as can be seen in FIG. 12. Probe 18a is manufactured and hybridized using the methods of Example 2. After hybridization, it is determined that probe 18a moved to derivative chromosome 22, meaning that the breakpoint was located upstream from coordinate 124,645,118.

[0070] Given this information, another probe, designated 16a, is selected using the methods above. Probe 16a corresponds to SEQ ID. No. 13 and is located near coordinates 124,621,608, which is located near another Bayesian maxima as can be seen in FIG. 11. Probe 16a is manufactured and hybridized using the methods of Example 2. After hybridization, it is determined that probe 16a remained on derivative chromosome 9, meaning that the breakpoint was located downstream from base pair 124,623,522 (the endpoint of probe 16a). Accordingly, probe 17a (as described in Example 2 above) is selected, manufactured, and hybridized using the methods of Example 2. Probe 17a lies between probes 16a and 18a near coordinate 124,630,536. Probe 17a moved to derivative chromosome 22, meaning that the breakpoint was located somewhere in the approximately 7 kb span between coordinates 124,623,522 and 124,630,536.

### Example 6

[0071] This example illustrates the relative efficacy of several of the breakpoint determination methods discussed herein. Five methods of breakpoint interval determination were used and compared. The bisection method, the golden section method, the combinatorial method using 5 probes, a combination combinatorial and bisection method, and finally the cumulative distribution method.

[0072] Bone marrow samples were obtained from CML patients and prepared for chromosome/cytogenetic analysis. Chromosome translocations from these patients then had their breakpoint intervals determined using one or more methods described above. A sample from each patient then had its breakpoints determined using the methods described above. The results for these series of breakpoint determinations can be seen as FIG. 10. These results indicate that the bisection method is best for the refinement of small intervals. The golden ratio method is very efficient in determining breakpoints in moderately sized (˜50 kb) intervals, but is not as efficient when determining a breakpoint in smaller intervals. The combinatorial method does not provide any advantages for delineating bounds of small intervals. And with respect to CML, the cumulative prior probability distribution or cumulative distribution approach requires more breakpoint data than is currently available for probe selection.

### Example 7

[0073] This example describes one method of identifying a breakpoint directly once a breakage region has been defined using the methods described above.

[0074] In order to verify that breakpoint intervals obtained with the instant invention are indeed correct, first, whole genome amplification was carried out using a small aliquot (˜1 μl) of cell pellet from the patient that had been previously fixed in a Camoy's fixative solution for cytogenetic analysis. This amplification followed the procedures of Hosono et al., Unbiased Whole-Genome Amplification Directly From Clinical Samples”, Genome Research, vol. 13(5), pp. 954-964, May, 2003, which is hereby incorporated by reference. The amplified DNA is then extracted twice with phenol and chloroform extractions, and precipitated overnight in ethanol.

[0075] The genomic DNA was then digested with restriction endonucleases—ScaI, RsaI, MmeI, and StuI, which were appropriate for the particular breakage regions. The enzymes were identified by simulated restriction digests of the sequence of the targeted breakpoint region. These enzymes cleave DNA in a manner that results in specific cohesive ends, determined from the reference genome sequence, that are amenable to ligation by primers for vectorette PCR. The target was deduced using the known sequence of the breakpoint region that had been delineated by FISH with adjacent probes using the bisection method of Example 2.

[0076] The strategy for verifying the breakpoint takes advantage of the restriction site distribution in the translocated chromosome and the absence of restriction sites in the breakage interval of the original chromosome, as well as the known sequence of the targeted region. Using this principle, vectorette “bubble” primers were annealed to the digested genome to produce a vectorette cassette in accordance with the method of Gorenen et al., “Isolation of Cosmids Corresponding to the Chromosome Breakpoints of a De Novo Autosomal Translocation, t(6; 19)(p21; q13.1) in a Patient with Multicystic Renal Dysplasia”, Cytogenet Cell Genetics, vol. 75(4), pp. 210-215, 1996, which is hereby incorporated by reference. The vectorette cassette was then ligated to the patient's digested DNA using “ligation cycling.” Using this technique, the ligated vectorette cassette was incubated for 20 degrees C. for one hour, and then incubated at 37 degrees C. for 30 minutes. This technique assisted the increase of the proportion of ligated products with vectorette units. This is because the presence of the restriction enzyme will result in the cutting of compatible ends and the restriction site is not reconstituted by ligation of the vectorette to the patient's digested DNA.

[0077] Next, one cycle of PCR amplification was carried out for the target sequence using a forward primer within the breakage interval. Then, the reverse vectorette-specific primer was added to the PCR reaction. The reverse primer is the reverse complement of the antisense strand of the vectorette in the “bubble” region. This primer will only anneal to the genomic target if the first PCR cycle as described above produced a binding site complementary to the sequence of the reverse primer. Nested PCR was then performed using a second forward primer situated immediately downstream of the first forward primer in the target region.

[0078] Then, gel electrophoresis of amplification products was carried out to determine whether both the normal and abnormal chromosomal DNA products had been amplified. The presence of two fragments on the gel, which corresponded to amplicons of different sizes, were determined to be likely to indicate that one is derived from the normal chromosome and one from the abnormal chromosome. The size of the normal chromosome fragment can usually be inferred from the computational restriction analysis of the reference genome sequence. However, it is possible for polymorphisms or other differences between the patient's DNA and the reference sequence to be present. Accordingly, this necessitated that DNA be extracted from both bands. After extraction, the DNA samples were purified with a PCR Clean-Up Kit (Qiagen, Valencia, Calif.). The DNA concentration was then quantitated using a UV Spectrophotometer and compared with the quantitation results from gel electrophoresis for accuracy. The fragments were then sequenced commercially (MWG Biotech, High Point, N.C.) using both vectorette-specific and nested PCR primers.

[0079] To confirm breakpoints on chromosome 9 for patients with CML, the electropherograms of the sample DNA and the sequences obtained were analyzed for homology to ABL and BCR genomic sequences. This comparison was made using the BLAT tool from the UCSC Genome Browser (found at genome.usc.edu) and the BLAST server at the NCBI (found at ncbi.nlm.nih.gov). One of skill in the art would appreciate that if the quality of the sequence was determined to be poor, then any sequence obtained would not exhibit similarity to the expected target. If that were the case, then it would be necessary to amplify the genomic library again by PCR using different nested PCR products.

[0080] This approach was used to confirm the localization of the breakpoint by the iterative application of the numerical bisection methods of the present invention in 10 patients. Genomic DNA was extracted from lymphoblastoid cell pellets from patients identified by the following codes: 52, 61, 118, 87, 38, 77, 133, 177, 43, and 45. All of the chromosome 9 breakage intervals in these patients have been previously narrowed by iterative application of the instant invention and the chromosome 9 breakpoints have been verified as occurring within these intervals. For brevity, the following describes the procedure used to ascertain the sequences at or near the breakpoints in patients 38 and 77. In order to increase the quantity of DNA available for characterizing the breakpoints in these patients, the 2 ul of DNA from each cell pellet was used in whole genome amplification as described above. This produced approximately 30 ug of replicate genomic DNA. Prior art studies of the this method have verified that the fidelity of replication is extremely high, so that the synthetic copies of these patient's genome are virtually identical to those found in the original samples. The synthetic DNA was extracted twice with phenol/chloroform to remove enzymatic contaminants and buffers and precipitated with ethanol prior to the next step. Genomic DNA was resuspended and incubated with restriction enzymes that were selected because the presumed breakage interval is deficient in these recognition sites. The mapped breakage interval in patient 38 on chromosome 9 comprised coordinates 124685740 through 124686078. Genomic DNA from this patient was digested with Rsa I and ScaI, neither of which cleave within this interval. The mapped breakage interval in patient 77 comprised coordinates 124604661 through 124608696 and this genomic DNA was cleaved with Mme I, Rsa I and Sca I. The bubble vectorette primer (which is complementary to BUB1 sequence) was ligated to these digested DNAs (reference), creating a vectorette library.

[0081] In the first round of PCR, the BUB-1 sequence (SEQ ID No. 14) (see, Zhang J G, et al., Characterization of Genomic BCR-ABL Breakpoints in Chronic Myeloid Leukemia by PCR, 90 Br. J. Hematology, 138-146 (1995), the teachings and content of which are hereby incorporated by reference), and the “16.16-1 break” primers (SEQ ID No. 15) were used to amplify the vectorette library in patient 77. The same BUB1 sequence (SEQ ID No. 14) and the 21DownF primers (SEQ ID No. 16) were used in the first round of amplification in patient 38. The second round of amplification in patient 77 used the BUB-2 and 144-2618 primers, whose sequences fall within the interval spanned by the BUB-1 (SEQ ID No. 14) and “16.16-1 break” primers (SEQ ID No. 15). In patient 77, as expected, two products were synthesized corresponding to the normal chromosome 9 sequence (585 bp) and the derivative 9 sequence (˜340 bp) (based on gel electrophoresis standards). The second round of amplification in patient 38 used the BUB-2 (SEQ ID No. 17) and 21DownFNest primers (SEQ ID No. 18). In patient 38, two products were also synthesized, namely ˜890 bp for the normal chromosome and ˜500 bp (based upon gel electrophoresis standards) for the abnormal derivative chromosome. The fragment corresponding to the abnormal band was extracted and reamplified with the nested primers for each patient. The reamplified products were recovered from agarose gels, purified using a commercially available PCR cleanup kit (Quiagen), quantitated by TV spectrophotometry, and submitted for dideoxy sequence analysis by a commercial laboratory (MWG). The nested primers (BUB-2 (SEQ ID No. 17) and either 144-2618 (SEQ ID No. 19) [for patient 77] or 21DownFNest (SEQ ID No. 18) [for patient 38] were used in the sequencing reactions.

[0082] After comparing the patient's DNA with the known sequences, a 161 nucleotide amplicon found in chromosome 9 (SEQ ID No. 20) from the patient was found to nearly precisely match (99.4% match) a unique genomic location on chromosome 22 in the BCR gene (positions 26,217,115 to 26,217,268) over 154 bp in patient 38. This process was also used on another patient 77's sample. In that case, a 357 nucleotide sequence (SEQ ID No. 21) obtained by vectorette PCR was found to nearly precisely match (99.7%) a unique genomic location on chromosome 9 in the ABL1 gene (positions 128,870,044 to 128,870,386) over 344 nucleotides. Accordingly, these provided evidence that the sequences came from the translocation partner chromosome 9. Thus, the sequences mapped derive from the expected genomic interval. Therefore, the present invention provides a reliable means of determining breakpoints in a translocated chromosome.

### Example 8

[0083] This example illustrates one of the differences between the present invention and the prior art. Breakpoint intervals for 27 patients with CML were determined using the methods of Example 2 using a span on chromosome 9 between coordinates 124,604,561 and 124,725,632 bp. The distribution of these breakpoint intervals can be seen in FIG. 11. As can be seen from this figure, breakpoints are not uniformly distributed along this approximately 120 kb sequence. Furthermore, this figure indicates that the distribution of previously known breakpoints obtained using conventional molecular genetic approaches (which are considerably fewer in number than that obtained with the present invention) is nearly uniform across IVS1b of ABL1 and flanking exonic regions. This contrasts with the non-uniform distribution of breakpoint intervals determined using the present invention, indicating a bias toward breakage at each end of IVS1b. This distribution of breakpoints could not have been anticipated or even determined using commercially available FISH probes, as many commercial recombinant FISH probes for this genomic sequence substantially exceed the length of the breakpoint region, which is the approximate length of this intron. Thus, these breakpoint distributions could not have been discerned using the methods of the prior art.

[0084] The 27 breakpoint intervals shown in FIG. 11 were found using methods of the present invention in a period of about 18 months. In contrast, prior art methods identified just 9 breakpoints over a 40 year period. It is clear that the present invention provides distinct efficiency advantages over the prior art methods.

We claim:

1. A method of selecting a genomic hybridization probe comprising the steps of:
(a) selecting a genomic interval of interest;
(b) identifying a plurality of potential hybridization probes of known coordinates in said interval;
(c) applying a numerical method to sample said plurality of probes based on their genome coordinates; and
(d) selecting a probe or probes based on the results of said numerical method.

2. The method of claim 1, said genomic hybridization probe being a single copy genomic probe.

3. The method of claim 1, said method further comprising the step of hybridizing said selected probe with said selected interval.

4. The method of claim 3, further comprising the step of hybridizing blocking DNA to disable hybridization of repetitive sequences with said probe of interest.

5. The method of claim 1, said sampling method being selected from the group consisting of the dichotomous methods including bisection and golden section methods, and combinatorial bracketing, cumulative prior probability distributions of probes, and combinations thereof.

6. The method of claim 1, said probe being labeled.

7. The method of claim 1, including the step of selecting a plurality of probes based on the results of said numerical method.

8. The method of claim 7, said plurality of selected probes being labeled with a plurality of different labels.

9. The method of claim 8, said plurality of different labels producing different colors or color combinations.

10. The method of claim 9, said colors or color intensities being deconvoluted by optical filters and measured with a device selected from the group consisting of spectrometers, photographic apparatuses, laser detectors, and combinations thereof.

11. The method of claim 1, said interval of interest being associated with a chromosomal breakpoint.

12. The method of claim 1, said method further comprising the step of repeating steps (a)-(d).

13. The method of claim 1, said probe being used in a hybridization platform selected from the group consisting of bead array suspension hybridization, microarray hybridization, fluorescence in-situ hybridization, Southern hybridization, multiplex amplifiable probe hybridization, and combinations thereof.

14. The method of claim 1, said genomic hybridization probe being composed of both single copy and repetitive sequences.

15. The method of claim 1, wherein said genomic interval of interest spans from the 5′ genomic coordinate of the ASS gene to the 3′ genomic coordinate of the ABL1 gene.

16. The method of claim 1, said genomic hybridization probe being selected from a group consisting of SEQ. ID Nos. 1, 3-13, and 22-56.

17. The method of claim 1, further comprising the step of detecting one or more chromosome rearrangements to delineate one or more chromosome breakpoint intervals.

18. The method of claim 1, said genomic hybridization probe being capable of hybridizing with plant DNA.

19. The method of claim 1, said genomic hybridization probe being capable of hybridizing with animal DNA.

20. The method of claim 19, said animal DNA including human DNA.

21. A genomic hybridization probe selected by the method of claim 1.

22. The genomic hybridization probe of claim 21, said probe being selected from a group consisting of SEQ. ID Nos. 1, 3-13, and 22-56.

The application's sequence listing, which the Patent Office published only in electronic form, follows.

SEQUENCE LISTING (56 sequences)

SEQ ID NO: 1 - DNA, 3911 bp, Homo sapiens
tccaaatctctgcctgctcagacacgcccctgggtgacagggcctccagagaccctggctcccagcttccagggctctggccccagccaagccagccagaggcctgtgtggacgaggacaggtggcaggaagggttaggggcaccagaaggaggtaggcactggcgatacagcttttgtcccaaagacaaacattataaaaccaatttacacgcagctgcaggggaaagctgtttgagaatggctcacagctctgttcctttgctgttctccagctgaatgtgctgaggccaccagcatggaaaccaaggttccttccatcctctggaccttggtgctcaggcagtcagctgcgtggcctttggtgtaactctctgagatatgtgtgaagtttaggggaaaggaggaaggccactggctgagccacaaaacctacctgtgcacgtggagaagcaacggcgcaggtgcgctgcctccaggtcccagtgtggcgatgcagagacccctcccactcagcttactcccctcaagtgaagcagcaggaggaggctcagtcaggtggcattgtgggatggagggctgcaggcatccaccctcaaactgggtcccaggggacggtttggggcccgtgggtcccaggcgaccctgtgcacatgctagcccttggcctggtcactcagcccacaggtctcgagctgtccctcgcccagggctctcccagcatccccatcctcctgtctcagatgagagccatttgcactggtatcagaccgtaggctctgcagggctagggtgagagggtgtggcccggagcaggtgcgcagggaccgtttttccccagtgccagcctttgaaggtgcccctggggagggtggggccggtgcgctggcctgggccctccccaccatgtcaagctccgtgcccattcagccggtgcttggtagggccatgtgccctctcctggtctgggacaggggccggtgctctagggcagtaacagggctctagaagggacaggcatccccagtgcagccagccactgaggacagatgctgccgggacctggacctggaccacaggctcacaggccacctgcacctgcccccggcccctcgccaggccccagccatggtgcatctgttccacagccaagccctggcacgagggccctggtgcctcctgctgcacccacacatctgtgagtccattaacttcacactcaccaggagtttgtttgatgacacatcagaaagtgctggcactttctaagcagtcgctggcgcagtcactggcatggggaggctggtagctcctgcctggggcctgtcggtggggggctcctgggatgagaactcgggtcccacccagcccctgcaatatgacagggtgctctgggaacccagatggtctgggtgggctcccttggcttctagatggtgggaagaggagccaagaagggatttcccgttgaatctcatgtggtcattttgcccacatcttgccccttgtggccccgcacctggcctgctccagccaccaccccggccacactaggctgccactgcctgattcttggctgtatctgcgtccagctgaggaccgagagggcagggaccaggtcctgtccagcctgggcccacggcagaaggaagcgctgcagacatctgcgcatgtggatgacctggtggcactgggacagagagccaggtcacacggcctctcccaccaacccccagtggtgccaagtcaaatttattgttttttaagcacaaacttcagtgggaggggaagggagaacggaaccccacaccccctaggcacctgccatcgggtgtcctttggaggaagccacctcccctcctgcccgaggagaggctgctaggcagctccccaaggctgactccagccctttcggaggccccccatcaggaggccttggaaaagccgccctgcatctgggcctgacgtaacgcacgcgggtccagggctgctgagcagacagctgaggacccggctccagccctgcccttgtggctgctggtcctgggagcctgcgggtctcacctctgcatgtgtgcacacaaggagtggggatgacagcgtgctgggtgttgggaggattcaacaagaaagtgtccaggtggtgcctggtctggtgccccagtccccccgaccccatttgcccggtgaggtggtccctgtcccttgaccactcgccgggccgggcctggcctgggtccaggtggccacggtcaatggcaagggttggcctcctcatggagacagccacctcagggaaggggtcatcacccccaaggccctcctgggaggcctcaggaccctggagtccctgggaaattggtggtgggggttgtacaagcctcatcccagccctgcctaggccccagcccagaaaaccaagagcttcccattagcgcagtccagccccacggtgcagggccccacccaccttccagaggcaggagaaatgggatggcagccccagctgccccaggtaggaggacggccgggagctgggtgggggatgggttgggcctcatttgagacagagagcaggtgggcacagcaggtaagaggactgcagaccccaggcctgccggggcacagggtgggtggcctccagggaactggtctcagccttggagcgtgggtccccaaaggcagcagctccccatcctgacctcagggcctggtaggatggggccacccagcccacagccaggctgaggcccttgggggagaggtgggttctctgggcaccagggaaacggggtgggggttggcattgggagggctggaggatactggcctcagacctgacctcagagagacctgacgttccccacgatctgctaggaggactccaggggtgctgtctgccccctgctctctgtccccataatgccgggtatttggccgggcagggcagagggtgcctggggcagactccaccatcctggccaggggacggcaaacagcaccggagtcacagtgggggcaggcaggagttggggtcgtcaagtttgccagcccccatcagcagaggcaagagatcagtgagctgccaaatggagggggtggggacggcgagaaggcgatgtgtgacttcaccggcccagggagcttcgtgtcagggatggcccggcccctccctactggagagtgggtccgccaggcacaggtgggtggagaacattcacgaaagagtgaggtggggtcggggatggggcgacagggaccagcagggccaaggacaaggtgcaccagtctagcggtcctcccggaccggccggatcttcatctcagagaacttgagtgagtactgccagccggtccaggaggaccactccacgccgtcggcataggaggcgtgcgcaccgcgcaggtactgcccattgaggttggacgtgtggcagttgcggtaccaccaggcaccgcggtagaaggcggcacagttgttctctgaatggtcgctgtcacggtccttggtggtgaacctcatgccgctgtgcttcaggagggagtcgcctgcgcaggggtgcacacaggtgtgggcacggggggcacgggtacacccactggtgttgcatgtgtgagcagacaccgagacactgcacgtgcacctggacgtgagtgcatacacgtacgcacgtgctctcacacatactgctgtgcacgcgtgcaagcgcacctgcccctccacacccgggtgtgtccatgcagctcacacgcacgcagtcccttctcgggcgtgcctggggctgcccctgggtctaggcggtctctatccctccccccagcttttccacattccctctcctgcctccccgctcctcggcctgagaggggaaacccagcccaggggggtccagccaccacactttagagacc

SEQ ID NO: 2 - DNA, 458206 bp, Homo sapiens
gttctgaagaaaagagtgcctctctccctgttcctcctacttagtgtgacatggtcagctccccctaattgtcccctccctctcatctgggcaatgaggaaagttgtctgagttagttccttctagagatgaacgacaatcaggctgtcttaacagagctgttctgggtacacagagaaaaaatcgctgtgtccattttacagatgcagaaaggggggtacagggagggaacatgatccagtcacttgactgaggtgtgactggttaatggtcaaactgggactcttgattcccacctaacagccccagtagaaccttctccaggatgcttcttactgtaggtttccttcaaaccagtctgcaaagtttttctgttaggggccagatagtactttctgctttgcgggacattcaagctctgtcaaaatgacttacctttgccattgcagcgcaaaagcagccccggaggacccatgaacagatgggcacagctgtgttccaataaaactttatttgtggacacttacatttcaaatttattatcattttcatgtgccatgaaatattcttcttttgatgtttttcaaccatttacaaatgtaaaagccattcttagtttgcacgcaggctttacaaaaacaagttcagaccagagtttgctgatctctggtttaaaccacagaaattactgatgatggaagtccaggctgggtggagagattagaggaggcgggaagaagtgcgggaggggcttcccaggccctcctgtaccctattcgtccagggtccacctgtgagggccttccttgggccgaacgcccctctttgtgcaacgccaggggtcaacgggtcagaactggagcactgctcttcgctaggctgttaattttttatggagctggggactttgtggaggtgatgcagaggcggagacccacagaggggaggtgccactcctctctcacccctgctgtctcctgcaggccgctcccagtctcacgcaggccttccatgtttgtgaaactactacttgttaagtctttgtccagtgtcttacagacttgaggtttttttttttttttttttttttgagacagagtctcactgtgtcgcccaggctggagtgcagtggcgcgatctcggctcactgtaagctccgcctcctgtgttcatgccattctcctgcctcagcctccagagtagctgggactacaggcatccgccaccaaccacgcccagctaatttttttttttttttttgtagagatggggtttcaccgtgttagccaggatggtctcgatctcctgacttcgtgatccgcctgtctcatcctcccaaagtgctgggattacaggcgtgagccaccgtgcccggcaacttgggtttacttagtccttccaggagctccagagccaagaaacagcatccccatttcacaaatgagagaaggagagctcagagaaggaagccacttatctatctcacacagcctggaggggaagagaaggactcagcccaggtccatctgactccagagtcctgggctctgaccaccaggctcccctgcctccactttccaaggaagggggaagagagagagggccaggggcaggctgaagacaagggcccttggcaattcaagatgtgaggagctaaaaagggagtgtctattcagccccctgcctccccacttttccctccttttccatttgaggctatggagcggaggccgggggaaaggagtgacttacccaaggtcacacagaaagcccaaggcagaccaggccttggaggtagattctgacccagtcccttcctcccctacactccaactgcttaccccgcccctaaggaaggttaccaagcagaggaggcccctcccaagcaagccacagccagagccagagagtattttccatccaaaaagggtgtttgccacttctttttctctagctgccagctgtcattggccaagactctgtccaagctgcccagccccctggtgccacctgacctctgcgagtctgtttgcaccatcaggggtggaaaacaggcctgcaggtcaggcattgaactccctgatgtgggttttccacgaacccaacaactggactctgtgttcctgtgggcgaggactggcaacctagggtctggcctggaggacactctcttttcccagggccaatgcccaggcttgggcagtggcaaagtggcttctggtgccaaccacaaggaggtttcagggtgagatccttgaagtctctacacacccaggccccttcatgcccagcaggtccagagcccttgggtggcagaggcgagaaacggaggcaggaggaagcccactccagggctctgtacacaggctgtatctatgcctttaggtggctgggggcattcgatgaggtcacatccattaagcttgccctgtagccactcagacaagtggccaccaaagttagagctgaggccaggcgcggtggctcacgcctgtaatctcagcactttgggaggccgaggtgggcggatcatctgaggttgagttcgagaccagcctggccaacatggtgaaaccccgtctctattaaaaatacaaaaattagccaggtgcggtggtgggcgcttgtaatcctagctattctggaggctgaggtagaataattgcttgaacccaggaggcagagattgcagtgagccgagattgtgccactgcactccagcctgggcgacagagcgagacttatctcaaaaaaagaaaaggtcagagctgactcttagaaaagcccccagctgcaatgtggagcatggagcagaggggatggtgagcacaggcaggaggataggtgaggtgtctcctgcagaggtgcatgtgagaggtcacagtcatccaggctaagataagagcagtggggagagacagcaggaaccagagcgctcacattcttccattttcttgctggaggcctcagccctctgctctgtgccagtatcagagcttatgacaagcaactgatctggtgggggagggaaaggataagaggcatcactaaggagcagtgtgtggaaagaccacatggcaaaaagggcttgacacgttgaaacaaccacagccaggccggcagcagcagtatagtgggtaagggcagaggaggaagtacagccattgagatttgaacctaagagtcatggggaccatcaaaaccttgcttcagaaaccattttattcattaatattgcagtacatagctctaaaactttataaatctttcaataaaaatataactacaagctgggtgcagtggatcatgcctgtaatcccagcactttgggaggtcgaggtaggcagattgcttgaggccaagagttcaagaccaccctgggcaacatgatgaaacccatctctactaaaaatacaaaaattagccaggtgtggtggcatgtgcctgtagtgccagatactaaggaggctgaggtgggaggatcacttgagcccgggaggtggagctgcagtgagccaagatcgtgccactgcactccagcctgggagacagaggagaccttgtctcaaaaaagaaaaataactacaatatcattattattacacctaaaaaatcaatagtaattctgtcttgctgttattgaatatctcatcagtgttcaaacttccaactgcttataaaaatatttcttgctgggcgcgggggttcacgcctgtaatcctagcactttaggaaggcaaggcaggcggatcacgaggtcaggagatcgagaccatcctggctaacacagtgaaaccctgtctctactaaaaatacaaaaaattagccgggcatggtagcgggcgcctgtagtcccagctactcgggaggctgaggcaggagaatggcatgaacccgggaggcggggcttatagtgagccgagaccacgccgctgcattccagcctgggcgacagagcgagactccgtctcaaaaaaataaaataaaataaaaataaaaataaaaataaaaatatttcttttgcacttaaaagaaatcagtatctaaatgagatctaaacattgtgatttattttattttatttttgagacagagcacgttttgtgcccaggttggagtgtgcagtggtgcaatcttggctcactgcaatctctgtcttggctcactgcaacctctgcttcccaggttcaagcaattcttgtgcctcaaccacctgagtaggtgggattacaggtatacgccatgacacctggctaagtttttgtattttgactagagacagggtttcactatgttgctcaggctggtctcagagtcctggcctcagcaatctgcccatctcagcctcccaaagtggtgggattacaggcataagccaccacacccagccttgattttatcttttatagctcttttaacccaaagattccccttctgtttcttttttttcttaaaaatcaatttgagatataattttttccaggaatgcaaggttggttcaacacctgaaagccaatcaatgtaacacaccacatttataaaataaaggagaaaatcatatgatcatttcaataggtgtagaaatagcatttgacaaaatttagtacctatttatgtaaaaatctttcaataaataaggaagaaaagtgaacttcttctgaccaaaaaaaaaaaaaaaaaaactatgaaaaacctacagctaacattgtacttaacggtgaaagactgaatgaatcctctgccctaagatcatgaacagggaaaggataactactcttaccaattctattcaacattctactggggatactgaccattgcaataaggcaagcaaaaaaggtacaaaggtaataaaggggaaagtaaaactgtttctattcatagacaacattgctgtctacctagaaaatcctaaggtatttacaaaaatctactagagtcaataagtgaatttaaaaaaagttgcagaatataaacctaatttacaaaagttgattttatatgccaggaacaattggaaaataaaaatatcatgtatgataacatcaaaaaattaaaattcttagaagtaaatttgatggaagataggcaaaacttatacacataaaacattgctcagacatctaaaccaggatggatctcttggtacctccactgaaattgaagacttaccctgatttgatgattacacattgtatacacggatcaaaacatcacatgtacccccaaaatatgtataactaagatatatcagtgaaaaatacaaaaaaaaaaaaaagaaagaaaagaaactgaggacttttataccacctatcaaagatgtctcaacctaccaggtcttcctctccactgtatggaagacttaggcctttgcctgggcacaggcctccaccaggccagtcatccaaggtgtccaataaattagtcatctcagagctgggccctggagtacccatacctgtgaccccaagaaactatctcttaaacaaacaaacaaacagaacctctctggctgttggggaggaaatgttggaggggcaactagggtaagtggaggagccagcaaagagacttaagtaagaaattataatggtctcagtaagagaagatggtggccctgtatggaggaagtggaagtggagagaaaggggcagacttgatatatttagaagatatgaatgttgttgggcacggtggctcacacctgtaatcccagcattttgggaggcggaggtgggttgatcacctgaggtcaggagttcaagaccagcctggccaacatggtgaaaacccgtctctacttaaaatacaaaaattagcctggtgtggtggcgggcctgtagtcccagctattcaggaggctgaggcaggagtattgcttgaaccggggaggcagaggctgcagtgagggtgccactgtactccagcctgggtgacagagcaagactccaaattaaaaaaaaaaaaaaaaaaaaggaaggtatgagtgtctcagatcccagtgcctttgtttctccacctgctcaggcctaggtgctgctttgtttttaggaatgccaccaagatcacttacctagaaggtgcaaaggctcctggaggacccctgacctaggtgtgggcagggggtaagatgaaagtcaaaggccatggtgccccagtctcaggtgggggaatccctttgggccacgccccactttggccctcagcactgctctgcagggtaagggccagggcagggttgaaggtccccctggccgatggaggggtccaggcagaatggggctcattcagaagctggccagtcctccctcaccttggtctctgcctctgggcaaccactcaccctgctgttggtggcaggacggtgggggtggggggcggggtgctgctggcagtttgggcccctgttttcttctcaggagcgctgtgacctcactgtccctcatgtcactggtgcatgtgagttaggaagggtctgtcccctaggctggaaccatttctgcggcaaggagtaaaggtcccagcagcctgtgaccctgggactgtgacctcagttcagctcaggctggagctaaagcagagggtttgagccagagcttcagacactggattctagctccgctctgccactcacatgctgtgtggccttgggaaagatacaccgtcattctgtgcagcaggtttctgcccataccattgagataacaatcacaggtacttcatacagggtagtcgtgaaggtgaaaacagaatgcttgctctttccagggcgaccctaccaatgagaaaacaggctgcagtggggagtgaccgccccaaggacacacaactgctgcaagggtgtcattgtgtaggtgttcctcacttgcctcctgctagtgtgggaggcccagagactccacgagacccccagctgctcctgtgagagggctgaggggggccagctgtgataccgcctcccatctagaaggggcctcaagccacccatgtacacccagccccacgtggctcaccaggggcccctttgccatcaagggccacatcccaggtttaagtgtcagagaactaaggggcttaagagagaatcgagctgtggctttgtttgtgaattggtttgatccttttttccttctagaaggactcacagctactgttgcttgccatgggcttgagggggtggtgggggctgactggcagaggggctgagagtggatggtgattaaaaggagcactgactccagggtagcggctgggcaaggcttggggctcccacctcccccaggttcagagccggctgaggaccgggagtcctcccttctggggtcagtgctcactatggagcaactgccttggatggggtcccaggacttgctcttttactggggctgtggttgcagtgatcagggctttggagccggcagaccaagctgggaaactcctgaggtagagaagctgttgaaggcgggcctggggtcacaactcccagctgctttttacaagcaagagacttctctctgaacctcaaccttccctcctgtctagtgggttcgcagccagacagtcttttactcactgcttactgggtgccctctggagtctgggcaggtgccaggctctgagaagacaggccagcaatcagccctggcctaagggatgaaagccgggccttcccgcgccggctcacctcggttttctcatccttactcggctaccagaggctatggttggggagggagggggctctgggggctgcagaaggcccaggctgccggcaccggatagaagtgagcacgaagctccctgcgccagtggaacttttatcccggctcccaccgcgaagcgtttaaattgcttccccagggccaggaggcaagtctctcgaaggacggctgcggccaccctccgcccctgagttacatgggtcgcagccactgccgccctccttggcgcctccagcccgcgggccagggccaggaaccgcgagccgcctgcgcccccgccggcgcgcccctgggagggtgagccggcgccgggcccaggcccggacctggtgggaggcggggggaggtggggacgaggcctggggaggcgggccccgcccatctgcaggtggctgtgaacgctgagcggctccaggcgggggccgggcccgggggcggggtctgtggcgcgcgtccccgccacgtgtccccggtcaccggccctgcccccgggccctgtgcttataacctgggatgggcacccctgccagtcctgctctgccgcctgccaccgctgcccgagcccggtaaggagccctcggcccctctcgctgcccactccctagccgagagcacccgcttcccgggcccagaggaggaggcgtagaagacgcccgccccggggcccgcggaggcagagggcggaccccgatcgccactcgccggggactgggaccgaggcaggagggaaggggctcccgatgctcaaacgcctggcaccggattccaggtttctggagcgtgggggacgcggcgggggcgcgagtccccgggggcgcgagtccccgggtccgaagagcggctcgggttatttgttccctgcgcagccgggtcctttctggactccttgtcggatccggcttcctctgtgtcgtgaagcccccacatggagacctggggagtccggagcgtgtgggggggctcccgattctctctccctctctcggactcgccgtctgtctccacctctatttctctgcgtaaaaccaggagtccagcccctctggggcttggacgtatcgctttccccgcagcctcagtttaccctggacagatgggcatggtggccctggctcccttccctgcagggggcggcagccacctggccctccccggtggggctggcggcctcgcggcggggtttcctgctggcctgggctgggctctgtgggaggggcagtgccaggaatattttctattcgggctgctgttgcctttggcccctgggcggctgcgccctccagggaggcagggtcattgtgaaagagaggaaactcctctcccaggcggccagggctgttcctgaggagggctggcctggcctcagtattcttctctgagaagtggagagtccactcccgagcagccgagtcaggctgcaggtctcagggcaggaacagacctgttctctccccaggggtagatcaagacctaggggacttgggctttgatcctcccgctcccagcaagcacaaacccagtgatggggagagctggtgaggccttggctcagcctccagattcccaagcttccttttcattttcttttctttctaaaaatttatcagagatgtggactcgtcatgttgcccaggctggcctcgagctcctgggctcaagcgaccctcctccctcgggcctcctaaactgctaggattacaggctcgagccacccaaagtgcctggcccccaagcttcagtctgttagagctggctggggctgagggctcaggaaacatttgcagatactgtgcggctgctaagggctctgtagactgttgggtgctgggcctgggtccaattgcacaataactgtgcctggggttaggttctgatgagagggagggagaagcagccacacggactgggaagcttggctaggagcaggaactggaggagtctccattccaaactccctctccctcccagaccccttaggcccaaggcctagggcggggaagtttgggggtgggggcgggaccctgtcctggcggggccatctgtgcaccatgctgagaagtaattctggttctgctctgtgggggtggatcaagtgaatgaatagtgactcctgcctgctgagcgcctggccggtgcgggggcagacacgtcgtgagagggaaggggaggccccactctcagcacagtctccattcctgagtgcttgggaagcaggcccagggccgcaggagccttggggtggagccaggcccaaaacagcctgctgcacaagcgcttccccctcccaacccgggcccatctcatctttggcctgctgggaggccagccaggtcaaccagatgcctcatctgagcactgactacacagtccctgaagtcagtggcttgcctgtgggcaccaggcacccatgtggaaagaggtaacttcgctggaattcagagtctaaggctctgatttctgatgtagctttgggcaaagttgatcttccagggcgtggctccctccccagacttggggtcgaccaggcacccataggcactttgatatgagtggaacgaatgaatgaatgtgcccttcgtccatcaccaaagacaaaccgagctcagctgagttagaatgtcagcgaggggttgcaggggaatcttccacggggcagtaggcctgagctatagcacacaggctctccagagaaatagtgggcaggttggccatgactcactggggggctggttttctggaaggtgtgtagagtgaaggggagatctgaggtctcctaggagccagggagtggaaggcctagtgcagggaagagcaagtggcctgcagtcaggctgggtttgaagccgctagcttgtgacctcggctggccgcttagcctctgcctcctcctttgtaaataggtggtaatggcagtctccaccttgagaggatgcacctgtgactgtgaacatagtagccgctcttgttgtcattccagctctgacgttttcaagtagcacgagttttccttagtgtcaagtgagcgcccaggctggcctgtttgctggaagctggacagatggctgtggctggggccacagagaatgccatcccaatgaaagccaggtggctctggtaccttgacgcgaggccaccttccctcctcccaggtgtctcttccggggaaggagggctggagggcagtgggcatttgccagggagctggagaaacctgccgtggccctttctgggggatgtggtgggggtggagctgggactaggggaggctgaattcagccaggatctgcctgccaggcgcagctcccaggaagaaagcccaatgtctgggagggtcagaacccagagggctgtcaggttgtacagatgaggaaattgaggcttagcaagccaggaacttggctgaggtcagccatagcagcggtgcacagagcttagtgggcacatacatgcttggtgcccagctctgggctccttcccccagcatctcacccaatccttacagtcgccctgtggggagcaggctgtttgcacccctattttgcagctgagcagttatgctagagagctgaagccactcaaacccatgtctggtggacttgacctctgtcctgtgcctggagtgagcgctcactggattgcagctgtggttccttctctccctgtcacttcctcccccgacatcaaaccctcagtttcatttagtttttgcctcgggctgcaaatgcagcttagggacctgcggaggctgagggaggggggtgccccacccgctgctgggagggcaggagcaacgctgctgtctgattgcatcattttcccaagcccatctgcccagctcatttctctgcatgcatacactggccccaacacccacacacgtgtgcatgcacacaggcacacatgtgcaagcccaaacacatcacacacatgcatgcacacacattgtgtactctcaggtacgcacccctgggtgcacacaggtgtgtgcgcgcgcacacacacacacacacacacactgtctcaggtacacacgccaggtccatgcattgcttcacactgcccagccccagaggctgaaggcctcagagcccacacctgcccagctacaacctggcaggcaggaggggctcactggtttcttttggtttatttaagacagagtttcactctgtcacccaggctggagtgtggtggcacgatcttggctcactgcaacctttacctcccaggttcaagcgattctcgtgcctcagcctcccaagtagctgggactacaggtgtgtgccgccacactcagctaatttttgtatttttagtagagacggggttttgccacgttggccaggctggtctggaactcctgacctcaagtgatccacccacctcggccgtccaaagtgctgggattacaggcatgaaccactgtgctcggccatgagagcatgtgtaggactccacagcttcagggcaccccagccctctttttgcggtgaggagctgacctccagagagtggaactagtagcattgttctaagtgcctgccacaggcatctgggagatggtccctgtttccatggagctcatagtgggggagagggcagttagaatacagcatgatggccggatgtagtggcccatgcctggaatcccagcactttgagaggctgaggcaggcagatcgcttaagtccaggagttcgagtccagcctgggcaatgtagtgaaaccccatctctacaaaaaatacaaaaattaggcaggtgtggtggcatgtgcctgtagtcccagctacttgggggtggtggcactgagctgggatgggaggatcccttgagcccaagaggtggaggctgtggtgagctgagattgcatcactgcactccagcctaggtgacagaatgagaccctgtctgaaaaaaaaaaaaaaaaaaaaaggatacagctctgatgggcaggaggcatggcgggtcactgaggcgatgcaggtgatccagctgtttctgtggagctgcccctccgtgtttctgtggagctgcctctcttggctccaggtgcctctgggaggaggcaggagcaggggtgactctcagagctgggtgaatcttgggccagcatcatcagatcacacttgcccaggacttcccttccttgagtctccagtggtggtcttgtacctatgagcagggggttaaggagccgagctgatctgagttggagtcctggctctgctgcctaccagtcaaacgagatgcagggcaagttcctcagcccaagcctcagttttcctgactctaaaatgaagagaaccccagatggaagggcttagcctaagacggacatgtctattcccttgattgtggtgttgatgtcacgggcgcatccgcacgccgaaacttgctaaattggacacaaaaaaatatgcgattatttttgtagttgatgaatgtgctgattgggtattctcgtgtgtgtgtgaggtgccaccctcaaactttgttatgatgttggcacattacccatctgatatttaaaaaatgcaatttatgatatgtcaagtagacctcaatagagctgttttaaaacatacaacagaatttcccgcaacccaaccacaccacccgcgccatcacacgcaaacaggggtaggcttccacatatttcctgaatgccttctggagcagggggcaggaggcaggaggcaggacaggtggctctggggctcctggacctcctctgctcagtgaggctgctcacaggagattgggcggctggaaagtaaggtttagggcctctgggatggcccaggctacctgcaggcagctgagtagctctgcttttgcagagtggttcactgcactgtgaaaacagattccagacgccgggaactcacgcctccaatcccaggtactgcccaccttaagtcctccctgcctgccttcctccctccttccctccatcctgcatggccaattgcctggctgcagttgccatggataccacctgctggctccagggttagggctggctgagtcaccagcaactcaggggcagggggttgaatgcccagtagggacgttgtgggcaccgaccagaaccatcttctctgccccagctgcatggtccatgaggtgtttccccttctaagtccaaagggcagcacaggcctgtgagccccggctgactggcaggtgggaccgtgcagcatgcacgggactgaattctcatgtgacggagctccaaagtccacctggctacacggccaggctctgcagcagaggacgggaggcctgggaaaggcacttcctctccccgagcttccaggcacacagagagtgctcaggatagcgatgcctgcatcactgcaatggtgatggccgggtgacccttctgggctccacttccccagtagtgtctaataaagaccctgggtgactctgaccttgtgacgttggtcagactccagtggaaacgttcccaggcagaacaaacatgccctgtacatttgggaaatgcgggatgctggggccaggtgtccacggaggctggaaccaggaggcctgggcccacatctgcccctgctgcttgttgatccgatgaccctgggcaggtgacctcgtctccctaaccctggtttcctgttcagcaaattggacacagtgaagacgcccaagcccagggccacaggaggcatgtgggggaggggggtgcagggcgagcccaagggcagcccaggattcagggagagccctcggggaagaagcatggctgcaaagatcaggagacaggaggccttggcgccttcgggaggcttcattgtgacggagggtggggcaggatgggagaccgcaggcacttcccggctgcagagggcctggctgcagagagccctcgtgcccatctgtccccccgggaagggccgctggttgcagaggtcttaggcctctgcctgtctatcgccttccctccctgggcctcagtttctctacctccacactgggggaagttggtctctgagcccctccaaactgggcattggcagagttgaattcagaggcgctcacatttggagacacgatgtctaaaattccagccagtgaaggttccatggggttgcaggtaggagagggactggggctgggcccctgccccacagcatccttctccacctgcaggtgggcggcggcactgcgtgctggggaagcacagattcttgtgccctctgtgaccttgagcctgccactgacctctctgagccctgctggctgcctccccaataggaatgacaactcctacttcatgaggttgtagtgggggctcaggggcacagggagatcccgctgaggctcccagggccctgcctggtgcttggcaaggagcagttctgatgggggatgtgtcagctgccagaggctcagagccaaggcccctcccacatctcctgcctgcgtgcattcctcacatcctggccttgggccaaactgctcagcctcagccgccttccctcgatgctggaggatcaggtccaagagatgcctctccccgaccagcctaggactgcagtcagcattcccaggccccagtgtggtctgtggggctgtgtgcagagtgtgcgaggtcagggttcccgggggtggcaggcactgaaggtgaacatcctgttcccgaccttcagtggcagcttgcccaggagacaaggctgtccaaggccaaggtcggggctgggctgtctgcaggggctggcggggggcactggctgtctcagggtcactcaggttgttcctcgactcccgccagacgctatgtccagcaaaggctccgtggttctggcctacagtggcggcctggacacctcgtgcatcctcgtgtggctgaaggaacaaggctatgacgtcattgcctatctggtgagggagcgacctgggtgtctgtcttcctgcgtgtcctgcaacctgtcctgtctgccccctgccagcctctgtctgggttgtcagcctgtctgctcaccgtcactcattcaagcctggcctcttctctcgaagcctgtcttgaactggaactaggaaaatagcttctcgttgtactgcctcactttctccatctgcaaattggccatccttgagatgccttccagagccaggtgatggaggcgcggggagggcacagaagtgaacttggcagtgctgctggcttagcctgcttgcagagaggcatgggctgggacctgctgccagccctgggaaggcacacagtcttcccatctccagagtatgctgtcagcctgcagtaattcagcaaagattgtggaatcctgagctggaaggaccctgggggatcacctggttctgggatgggaaataggtcacaggtgatgggttatgtgtgaagccacttcctcatccagggcccataggagtcatccctctcaaactagctcctcttcgactgaacctggccacagctctgagtccttctctgtgtggctgtgctgttcaggactcttaggtgcaaattttagaaactgaactcaaaccaacttacgcaaaaaggaaagggaaaagacaattcttggctcacacaactgagaactccaggggtaggatggcttcaggcagggctggatccaggtgcttctaagatctatctccaactctacttggcttcattcttggcctctccacagggcaggcaaggctcatggtcaccctcatagcccacctttcccaaaaaggagggcttacccccagtagggcccatggggacccaccacgcattagtccctatggctgcatcatggggtgcgaggcttgggccatgagcctactccttcagtgggcgggatttcttcctctccatccctgtggaatggggtccacccaggaaagaaggttctgtttccagaggaagtgagcctgggtctctggacagacaaaacttagctcttgccaaaagtggcttgtttgccggcatattggcatgtctaactgcgcccaatgcccttgtcattcaggttggggaaagtgaggcccaggggaagaaatactttgctcacagtcacctggtgggtgagagcacagctttgaggggctgcaaagagcccagggtgtatccatctcactgtaggtagcacagcggggcaatcagagctggagctgggcgtatagacccctgggctaccacctgggggatttaaaagctgaatgtgattcagataagcacctgcagctgggctttggcaagattccagggtctggtgagccgaatgaagggagtgagggctgaggccaggatctgggcagcaggccagagtccaggcagcaggaaacatggcagtgtctagacaggggctgtcagaccccgaggtcagggcactggccacagggacggagctggaagttcctgagcacgggcttctctgcctcccgcctctcagctgcctcaggatggccaaggcatggcctttgactagggaggagagctggaggctaggaaggccctgacaagctaatctttgcactggctgagaaagagttttctggaaaagacagatgagtttcaggagaaccctagaccttccagcaatgacagcagatggttgtctcccagcagcctgtgtggccagggccaggctcagccaatgctccaacccatggaagccaccagccatcaccacgctacaatccagctcccaatctcacctcctggaagaatctcacctctccaggccttgggctttgtcctttttccttcttactgtgacttggccatggaatggaagctgtctctgtagcagggggtgggaggctgctgcatgcggatggtgtgaactcagggctccccccaggggctgacggagcctctccgcttctgcttctcaggccaacattggccagaaggaagacttcgaggaagccaggaagaaggcactgaagcttggggccaaaaaggtaccaggcgggaggcagggatttgggctgggagtggggcggtgatgtggagggcagtggtggatgctcctgccccagggatcccatcccttccagtgtgtcttcttgcttctaagagtatgagatcatcctgctctcaggtgtgtgaaccctcttgtttttctgcctcccccacgccctcttccacccacccaccttcccatccaggtggagtgtctcttccccacccacataccttcccttctcttttatctctctgtccatctatgcacccactcaccctcttttatctctgtttatctactcgtccacatatccatccatcattcatccctccattagctatccatcgatccatccatccatccattcagccatccatccatccatcacccacccatccattcacccatcatccatccatccatccatccatcacccacccatccattcacccatcatccatccatccatccattcatccattcatccatcatccatccacccatccatccatcacccatccactcatccacccatccattatccatccatccattcatccatccatccatcatccatctatccatctatccatccatcctccgtccattcatccatcatccatccatccattcacccatcatccatccatccatcatccatccattcatccatcatccatccatccatccattcacccatcatccattcatccagccatcatccgtctatccatccatcatccatttattcatccatcatccatccatccatccatcattcttcatccttccatgcatcatccattcatccatccatcatctacccatgcatccatccatcatccatccgtctattcatccatccattcatccatccatcatctatccatccatcccattatccattcacccatccatcccttcattatccatccatccatccacatatccatctgtcattaatccctccactgtctatccatccattcatccagacagccagccattcatctatccatcccccatccatccatccatccttcatccattcaccgtttttctatccatccattcatccatccatccatctgtcatccatcatccatccttctgtccatcatccccctacctgtccttccctcttttatctctctgtctacccattcttccattcattcaacagaatcagagaactccaattgagtctggtgccttgattgtgaatctaggcatgtggcaggcagacccctgtcccatacagggcatttatgatgaacagtgtcatcaggacccctgctcacatgtgctcactccccatggagaagcccttgccacttgtgccccttcatttgggagagtgagcaggggacatagcagggatgatgtgcaaggccaccagcccacctgcagggtcagagctgatcccctctgtggggtgcttctgcagggttgccagggtaattagcatgttaaaatgaacacgggagggagtggatgccccagtcccaagtcacctactggccacaggcctggaactagaatgtccctccttggttctgtgcctcccgagtgctggagagcagaggggttgtctgagcagtagtccaggaaggggagaaagagccctgagtgttgaagattcgagtgcgctttcagcagcgcaggagcaggctttgtgcacggcttcagcttttgtcctttattctagatgagcagttctcaaaacttgtggtcttgggaatcctctacactctaatttacgtggcgtttttaatgtttattttcttgcatataacattaggatgggccaggcacagtggctcacgcctgtaatcccagcactttggcaggctgaggcaggcagatcacctgaggtcaggagttcaagaccagcctggccaacatggtgaaaccctgtctctactaaaaatacaaaaattagctgggcgcgatggtgggtgcctgtaatcccagatgctcgggaggctgaggcaggagagtcgcttgaacccaggaggcggaggttgcagtaagctgaaatcacaccattgcactccatcctgggcaacaacagcaaaactctgtaaaaaaaaccaaccaaccaaccaaacaaacacaaaaacacatttatcctaatgttttttatatatccttagtcccaattgctttcttttctatgcctttttatttcattttttaaaaggatttttttcaaaataattatagacacaggaagttgcaaaagcagtaccaagaatttctcgactcttaaaaattattgaaggccttggctgggtgcggtggctcacgcttgtaatcctagcactttgggaggctgaagtgggcagatctcttgaggtcaggagtttgagaccagcctggccaaccagcctagtttctttagtagagaaaccccacatgcctgtagtcccagccactcgggaggctgaggcaggagaatcacttgaacccggaaggcagaggttacagtgagccaagattgcacctctgcactccagtctggatgacagagagtccatctcaaaaaaataaaaattactgaaggccttagagagcttttgtggattacatctgttgatatttatcacattagaaataaaagctgaaatgttttaaatgaacagttcatgttaacataagtaacattacacttatgaaaaataactattttctcaaacaaaaaattttagttaagaatcttattggcttccatttttgcaaatctctgtaatgtctggcttgacagaaaacagatggactcttgtagcggttttctgcattcacttgttttttcgtttgtttgtttgtttttcttttttagcctcccagggcttcctcgctatgtgatgccttgttttattgaagtttatgaagaaaactgggcaacacagtgagatcccatctctacaaaaaataaaaaacttagccgggcgtggtagcacatgcccgtagtcccagctactcaagaggctgaggtgggaggattgcttgaacccaggaggttgaggctgcagtgagctaggatcacaccactgcactccagtctggatgacagagaaagaccctgtctcaaaaaaacaaaaaaaaagttttcactcagtgtctccctgaaaagtcattgggaacccctgggggtctacatttcaagaaccattcctctggatcggggtttctcagtcttggccttgttcccgtgtggctggccgtcctgtgcacgggaggattttagcagtatccccatagcctttacccactagatgccagaattccaccccccacctggtagttgtggcaaccaaaaatatctccagatacttccaaatgcctcccctactcccacccccaacagggacaaaaccgtctctggttgggaactactgctgtgagatcttaggtgacaactaagtttcatcttgttggggctgatttagaagccacatccagtttcacagaacggtgcatcaggattgattagcaggctggccgcggtggcttgtgcctgtaatcccagcactttgggaggccgaggcagctggatcacctgaggtcaggggttcaagaccaacctggccaacatggtgaaaccccgtctctaccaaaaatacaaaaattagcaagccatggtggcatgcgcctgtaatcccagctactcaagaggctgaggcaggggagttgcttgaacctgggagacggaggttgcagtgagttgagactgagccactgcactccaacctgggcaacagagcaagacttcgactcaaaaaaaaaaaaaaaaagagagctattgattagcaatgtctgccatgagtgcaggagggagagtaacagtgcagtgtgctgggattgatgaatgatgtctactacagatgcagaagaagaagcaccaggtacagcgggggtggccccgtataggtctcagctagctgaggcccctggggctctgtatgccagatggcccctgtccttgcctacttcttccttctgggctcctcttcccgtaggtgttcattgaggatgtcagcagggagtttgtggaggagttcatctggccggccatccagtccagcgcactgtatgaggaccgctacctcctgggcacctctcttgccaggccctgcatcgcccgcaaacaagtggaaatcgcccagcgggagggggccaagtatgtgtcccacggcgccacaggaaaggtgaggcacctgggaagggccgggcagagggagatggaggcggaggggtgtgggaaggagatgagcacccctcgagcggtttcctggtgtgcctccggggcagacttggtgcaaggcagctacatggctttgtttagaccccaatgagaggggtaacagctcgcccctgcgctctgtgcactgtggcacctgaacgcccattctgagtcctcacctccaccttctgctgtgggagcgatgtcaccccatttggcagacttgctgctgaggcctggggacattgtccaaggtcgcattggccaaggtcactgcgtgagtcccccaggggacacgcaggaaagtgttgaaaaccctgagttggcagagtagggttcaaaggcagctctgctgctggcttgccgtgtgtcctcagccagggcccttctccccttcctgaacctcagtttcttcatttgcaagatggggctcatgccatgtcttagtttcccagggcgagggtaacaaaatgtctcaaactggtggcttagaacacagaactgttctgcctcatggttctggaggcctgaggtccatagtgagggcatgggcagggccacgcagcctctgaaggtgccaggaagcctccggctcaggcctctctccagcttccagtggcctctggtgtcccttagcgtgtggctgcgtcactcctgtccttccgtcctccatcttcccaagctgtcttcttcctgtatctctgcattgtcttccctctgcttgtctgtttaccttccccttgctacaggaacccgtcttggattagggcccttcaatgacctcatcttaacttggttactttttgtgtgtgtgtgtgggggagagggacaaagtctcactctgacgcccaggctggagtgcagtggctcgatcttggctcactgcaacctctgcctcccagattgaagcaattctcctgcctcagcctcctgagtagctgggattacaggtgtgtaccccaccacacccggctaattttttgtatttttagtagagacggggtttcgccatgttgggcaggctggtcttgaactcctgacctcaaatgatccaccagccttggcctcccaaagcactgggattacaggcgtgggccaccatgcccagccttaacttggttatttctgttaagaccacatgaggccacattcggagggactggggttaggacttgaacccattattttgtggaaacacaaatcaacccatcccgtaccccttccctccgggccgtgtgtcccagtgcagactgcggggtccccgtggggtgcaagacaggaagccccctgcctgctgctcttcggaaggcagtccttgagaaaccagattcctgacaatgttggcaactgtcagccgatgtttttataaagacccaagtcatgagctctcagtcagcggacagcatgccaagagcctggtacaggaattgactgtttaccaaccccacagtcagaaggctcggaaactccccagtgacggggagctcactacctcgcctgcccgggctggtcagggtgctgatggtgggaagtcctggctcactgtgggaggtcctggctcactgtggtgcagggacacacacagctaagatgatgatggaggagacgcggttgatttgagggtggcctgggagacagccacccaccaggatggcacctgtcatgtctttgaaagtccaagtgttcatttcttcaccggagcactggttcagcaagcttgcactgggtatctgctgggagttgggtgcttgctggcattggcacagtgctaacttcttgggctcattgcgtaccttcagagagcccatttcctggcaagagaagagaaaatggatgtgtgatgaggaatgggagtggggccaggggtctgtgccagggaactgcgggagcagcaggcaggggctgaggatgagtctagaggagtgaataatggcatggaagagtgtgagaggcagagggaacagcctgtggaaaggcttagagccaagaggccctgaaggacagtctgtctggggctgtggagcaggagctattgctgtgggggaggcaatagggccaggactgggctgaggccatgctgggaggtttggcttcatcctgagggcaactgattagtgggtggaaggaggtctcaggttggatggaggtggccagtgactaccccagcgagatgctggggaagagacaggggagagcttctcacagactgcggccttggtttttactgtcactccagctgtggatgatgggatggtaggaaaccaggcaaggaggtttgggcgggcctgagctgttgggcaggaccgtgtgtatgctgccatctgtgcaaaggtggtggcagaggaggagaacccagaggatcaggactgggcgacacagcgagactctgtcccaaacaaaaaaaaaagctcccgacccatctgccttaatggaaagagctggatcgtgagcttcctatcccagaaggcatacaagccgagggcaggggatcagaattctgggaggggtcctgccctcaggtctttccaacggtaccattaaggttcagtagggcggcattcaggtctggtggagtgcatgggtgggtgggtgagtatgggtgggtcggctctggctcaggcagttcccgggtccatgcggagacccccaccccggaccagcccacatttagcctgcaacagcctcccgcagccgtgtgcgcccctcctccatgtggccaccagagggcgccagaggcttgggtttgaggccttgggggccgacaaaggcgggaggaggtggcggcaccaccggggtcctctgttccccatcctggacctgcagggcgtggttctgaggagaacgccccccaagctagtgctatggccgctcgggacttgggggcgtccctgcattcacactcagaagacccaacagggacggactccggggatgccggggagtaggtgctacctggcacagccacctctttcctggggttgacaggcaaggcgtacttctgcgcctcagtgtccctttatgacagtacccaggaaacccccaacagcctctggagacaatttccgagaactgggggtatgagtggagaaccaggaaggctgggagcgaggggaatccaaggccttggaggtgctggtccagccttcaggcatttaccccctgagtaaccacccagcaccaccatcccatgagtatccacccagcactgccccgggcgccatcacgggggacgggccaggtggaggctttcgggtctttgggctcagggaaggtgacagtgaaatgttggggggacaacggattggcctgggatgtgagggggaagggcatcctgtttgctggaaccgcctgagcccagccctgaaggcagaggcggaggcagcctcccttcccagcaccccgtccagacagcacctggtgcagaaattgagccgcactctcccctcccatgccctgctgccagccccacccctgcccacccagagagctgcaccgaagctggggtggcccttgcggggctcctctctccccctagttttggaagaggggcctggaaatatgattctgagactctagccggggagcgagagttttgtaaatggcaccatctgtatgggtgccccagggcagatgggagaccccaggccccccagtcccagtgggaccgtgtttacatgcatgtttacacacgtgtgcacaaatatcagcatgcggacactcgtgtgtgagacactacatcctccttctccccggaaagctgccaggagctgccctggtgctggggtcttggggttcagagggggaaggattagactggcctccttggctcttgcctgagacgagggcagagtttgaaccaaggaagcgtttgtttggcctcttcgagggtctctggctcctgaacagatgggtgtccgcatggcagcatctggatgggcagacagcagcccagccgtgcctggctggtgaggcacaagccgtctttgtgttggggaaacatgaagctgtgggggaaaatagctgggccatgcaacgtcggaccatgccttaccatctaaaatgaggctgtcttttagttgctccaggaacggggccggctgggggtcagcaggcaaatgtggccgcccccacctcagtgtcctcatccgtaagatgggactaatagaacctgcctcctggggctgctcaaaggattcagtgagttaattatgcatggagctcagctgggaagcctgagtgtgaaccgttaggatgagcgagtttgctgtgtggccctgggcaagtggctgcacctctctgagcttcactttcctcacccataaaatatggctaaaaatccccctggccctgggggcctctctgagtgacagcacatagtaggtgctcactaaaggggctgcatggagggtgagtgaggccagcccaaggcctgtgccgcacacacagctcccagctctgcagagaggctgaaccctggattctgtgccacctgacgagagtctggaaaatagcatgtaattcccaccgctgcctggctgcgcccatgcagttttcacagtaggcaaaaggtccctctgtcatttccacagcgcttaagtctccctctgggctgccgagcccacggggaagcaggagacgtgcgcggccattttctctctggggacagagctgggctggcggatgcctgcgctgaccccggcctcctcctcctcggcatcagtgtggacggtggtcccggctatgtcgggggtaacgttcacagctcagtggggtgttgaggtgtctccatttgcccacagaggatgcaggcgaggcaacctgcccgagggggtggctgtggtgctggggacctgggcttgggtcccgggcctgccctggctgtgtgtccttggactggttcctttcccttcctgggcctcagtttccctctctgtgcagagaagagctgaggagcaaaaggccctcagtggtcacctagttccacctcctccctgacaccagccattgaagagatgcggaaactgaggctcagagaggtgacagggttcccaaatgtatgggtatgggggagtccaagcaccctggtgccccagccctgaagtgagcttgatttggggcagggcagggtcagcaatgtgggggccttgaggaagagactatagtgcgagctctggggctgcaggagcagggcctggccccccaggtcttgccagtggctgggcctccagctccagggggtcagatgtgtcctgcacccacccacgtgacatgtgtgccctctcctatactctgccatgtccccagacgtgcacatctccctcctgccacatgcccacacatacacgacctacactgcatgacctcacatgtgtacacgctctgcccagctctgtctccgccacgggctgtccttgtcctcacgtcctcccccagactccagaacccccatcctgtggctcctgacagccctctgttctgcattgcaggggaacgatcaggtccggtttgagctcagctgctactcactggccccccagataaaggtaggatgtggctcctccccttagcagggagcactagcatctgcagcacctgatggggaggagggcacagggttctgggagattccacaggacaggcacagaatctcctccgtggcaggggtgcccatcgggtggacagcctgctggggaggctcccttcgctggggccagctccaggggacacactttcttccccgccattcattcttcccggagaggctgtccaggtgctggggcacgggatagaaagtccctgccactcttcagccacatccctggcatcccaggtgtgggcaggcatggctctggcaccccaggtgcgggcagggatggctctggcaccccaggtgcgggtggggatggctctgaaacgtggttgctggtgtctgggatgctcagagccctccgagccccagtcagagcccccagctatgcctggctcctccccaggccacctgtgcctggtccccagcatctcttgagcctttcctggggtgggaatcaccaggatctcagggcctcaaccgccctggcccgtggcatgtcacccaggcaggagggcacctgtgggtattgcccagactgctactaccatccccacccctccagcttgaccttggacctggcctgcgtccatgcatgaatgatggacacgttccttccttcactcgctagctcatccttcatccagtgtctactgagcacccactcagctccaggggtgccgagtgcagggcccagggcagggccgagcagtgggagtttgaggcacactgccgctgcaagctgcccaatttttctagtagccatatatataatatataaatatttttatataatatgtattacatataaatacatatgttttatatatatatatatatatatattttttttttttctttttctggagactcgctctgtcacccaggctggagtgcagtggcacaatctcactgcaacctctgcctcccaagttcaagcaattctccctgactcagctcctgaataactgggactataggcatgcgccaccacacctggggtttcagcattttggccaggctggtcttgaactcctgacctcgtgatctgcccgccttgggctcccaaagtgctgggattacaggcgtgagccactgcacccggctgtagtagccatattaaaaaatagaaaaatgaaacaagtgacatgattttaataacatgttttaccgaaaccgatatatccaaaatattatcattcctcctataatcaatgtaaaaaaataattattaatgtttacattcttttttcttctgtgttgagtctgcaagacccagaatgtgctgcatgcaggcatgtctcgctagctggctggatttcaggtgctctgaatggccacccgtggcttgtggccacctgtgggcagcacaggccgggactgagctcttttgaggccgctttgggctcaagctctggaagagttgccccctcctaagcccccaaggggctcacaggagtttccattttgttctttctaagaggaatctctttccccgtccctttaaccagctggtagctcttgggatgcgtggcctggaggtgagccgtaatgagctctaatgatctgttttgaccccagacaccaggcagctcagtggctgggacagtagctgcttgttgacttgctgccagcgaggccgcaggacggggccctccctcggttcccacagcagcttgtggggccagggtgtccagtttcgaggtctttgtctgcagaggccaagcccaggcactgagatgggattggggcaggggccaagctgctccaggagctgggagtagggctgtggtcttcccatggctgctctgaggggctgaggaggtggcgggccccttccattgccctgcaccactgtcagctccacggcccagcagccaaatgacatctccacccccacacacacatgcccccgagtcctgctcagaggcaggggcctggtgagctccagggctgagtcgggggctctttttaccagctcaggccgaggggctcaaggggaatgagcttggtccctcagccaggctcagagtcttcccccacttctttcccttccacacccagagaagtgggtggggggcagcctatgcctctctgggcccccgaccacacgtggggccaggccagcagcggcagctctgtggactctccctgggtcacggcagtggccctgtggctgaaggtgctggcaaggaccatgaaccccgtctagttcaaactctcaggtctcatctggggagactgaggcccagggaacagggacccccttctcaccccaacacaccaccattctgccatggagtgcaggctccgtccagccagccccggtgagggagtctgtgtccttcccctccttcatggggctccctctcaccctcacaacagcatcctctctggggacatgctggagacccccatgggcccctcccaggagaggccagctctgcagcttacaggccaggggaagcccacagctcggccctcccggctctgaccccttgtcctatgtccaggtcattgctccctggaggatgcctgaattctacaaccggttcaagggccgcaatgacctgatggagtacgcaaaggtatggccgagtctccccaccacccccaacctttccctatagcccccttcccgggcacgtccctgctgggggctgtctgagccagtggcctaggccgggactgaccccatgtgatgggggattgaacttccaccccagctgcctacacacgtggcctctgtcccctgggctgaccccacagaggtgtggtcatctgccagcccgttgccagggcggagccgctctgaggccatttcccagtcccccgagccagaggacacagggctcactctctctcctgctccctgggaggcggagaccagagccctgcttgccacctccgcagtgtgtgtgtcttggtgtgtgtcacttggggggatggctgggggatgtgatggccggccggggggatgtgatcgggagctgttctcccaattccctggatactaattgcccctagcgctttccccgggaacaggtaggcgctccaagggacagtcgcagacaaagccttttatggcaccagccctttttgaagtacaagttgcaataaaacatattagaagttttgcatcaagatccttagccgctccccagggcacctttctttttagcgactcgatggcagcccttgacaaacagcctcaatcaatcaggccggggaaaagcaactcagcgcacacaccagaaaattgctcaggtttttaaatagcagtcgccaaggctggctgtgagctctcgctgcagccaaggtgccgcgtggtaggggaggcggcagggacgcagccctgcccccgccgccagcaacccattaagacctggagtgctgggagggaagaccttctccaccatctgttgttttattattaagaggggagtttacaagagcaagcccatatgttgccaaacaaattgtcaaatagcagagctattaagggagccgggttggtgaggtttctcccctggtctccttgatgatatagaatatgaagcgtgtttcatctttaagaataatgaattggagcccccacccagctctaccctcacgcctcgagtcctggatagagaggggcagggccgacccatacgttgccctttctttccgttaagtccccagacaaaagcagcttctggtttttctagcatagatgagtctcaggagcacactgctgtccttccttctcaggttttgaggagaaggtgctgagctcagcttccatcccaaataaccttttgagccggaaaagtttgccagggaaagatgagcatggccccctcggccacctaccctctcctggagatgggtttcatcagaaatgactgtggggaatctgagcacgttctagaaggaggcagaggcagtgtttctgcacccaggaaatgtcagaatgactgagcagtgatgaggcctcctccaaaattctgagccaggcaggatctgagatggatgacacaaaaatcaatggggctttcaaaaatctctgctttcaagacgcttcggtagccaaggcaaaaaggcgccagaggactcataaaaaacatgcatttgcttcgctggccatcctctcccaacccatcgtccaacggaaaaacactcagaaccaccccatccttgtcactgtcaccataatttaaaaaaaaattttttttagagacagtgtctcactctgtcacccaggttggagtgcagtggcacaatcctagctcattgcagcctcaacctcctgggctcatctgaccctcctacctcagcctcctgagtagctggaactacaaacgtgccctagtacatctggctaatttttgtttttcatatatttatttatttatttttttacagacagggtctcaccatgttgcccaggctggtcttgaactcctgaactcaagtaatccaccctccttggcctccccaaagtattgggattgcaggtgtgagccaccacacccagctttggctaatttttaaatttttttttgtagagacagggtcttgctatactgcccagcctggctataattattatttttaaagccagactacaaggtgggagctagaaacaggatggtctcacgttgtctacatgttggagatcgttttgttttttctcctcaattacaatgagagtgtgaggggaggcacctcgggaccgagagaggctgggaaacacaaatctctttggtcttgggagggtcattgtcattggcccctgttgctttcctccccgccctttagcctctccttgctcctggacggaggtccgctgagaagggaggcaaaggttctttcacgccaccgcccaaaaacagaggctccacggagcctggccggctgctcttcttagcacccagctgctgagctgagtgaggagcgaggacggagcccagcaggccaccaggacatctctgctggagagtccagtcttgccttgcacagggtccgggtacccatgcctggccaagggcacagggcgagtgtgtgggctgaagagtcttcaaattctagagtagatcgtgggctgtgttttgtttttttaaatttcagttttcacgtgtaatatggtaactgttgatgagataatctacacaaactaaggctcttaggggcccttagtgattttttctttctcttcttttttttttcttttttgagatagagtctcactctgtcacccaagctggggtgcaatggcactatctcagctcactgcagcctctgcctcccaagttcaagtgatgctcctacctcagtctcccaagtagctgggactacaggcgcctgccaccatgccaggctaatttttgttatctttagtagagataaggttttaccatgttggccagactggtcttgaactcctgacctcaagtgagccactgcacctggccttgtaggctgttttaaaatgagtctcctggctttctagaaaaccccgaaaccagagcatttagcctcattttaatgttaaggtggtgatggggaaacagctgctccctgcaggaggcctctagaatctcaccatcttgggaatgagcctgagtggggtcgatcccatcaggagagagatgggagggtgacccggtgggggctgcctgtggttcccacagggatccagtggggctgaggggctgaaggggctcagaggcagagcatccagtctcgctggctctgaggggctgggtggggccccttcagtgcaccctgtgccctataagcttggggccaggagagcagtgccaggtgtccgagtgcaggaggaggctggagtgcacgagctggattccagtcgggcgtcatcaagggtggtgcgggtccccagggcgacaagcctcatcttcttcctcctcttaaggctgagtcaggtgggccttccatgcgtgacctgcagccctcttagcctgggcctcctgggcagaggtgggtgtcctcctgtaacaacagactgggccatttaggaagcgaaacagagccagagccgagtgccttggagacgggatctgctgggtgttccccttctagggtctgcagagtgatgtgtgtggctgttgcgccaggcccagggaggggtgcccccagaaggtgtgggccatgagctaaaagctctccctgcatcctacctgtcctggggtccacaggaagcactgcctgggctctggtgccaggtgccccggtccacagtgcgagcgggttcacacaagccccagctcgtagggtggtggcggggctggttggctggtgccgggagacctggctgggcatggcacctgcgtgcttgctcagtgcttcaggggtccttgagatgtagactcaaagtcttctggaaggaacctccaaggtcagcattgcagacacacggtcctgcagtttctctggggcatgtccagcaatagggtccccccagggaggtgaccgtgaccaacactaggaggtagccagggtcttgtctgaatgggggccagagtttggggctctctgaaaaagcagggcccctgggacggacctcacgcgtccttccagccgccttacctccacctgtgctgtctctttcctgcagcaacacgggattcccatcccggtcactcccaagaacccgtggagcatggatgagaacctcatgcacatcaggtaaatcccaccctccacccatccttggtcctcccgggctcattccaaaggacggccacgcgctgccccaggacgtcctggtgacccccacaccagtggtccctgccctcggggagctgagaggcctcaggcaggacagaggtcgaagcgcccggctcatgcactgccctcattgcagttctgctgagtgttgttggggagatagatcatggggacccggcctcatcaggagtatcaaggagggcttcttagaggaggtggcattcaaggatggagaagaggcccagatgtggcacaggggaagagtgtttaaggcagaggcagaggcccccccaaccacgtgcagagccccggggcagtccccagaagacaggtaaaggccccagctctttcttacaacctgcagctccacgggtgactatggtgggcccagaatgtttcaggcaggttggcagcagatgctctggcagagagtaaaaggcagaccaggctcatgggcacaatggggtgtgtgtgttgggggatggggacatgccatgtccctccccagctgaccctgtctttcctttcccctccgcagctacgaggctggaatcctggagaaccccaaggtaatcccccaaaccccatctcctcccagctggccacctttggtggtagcagctccatgccgatgctgtctgatgtatttatagcctaatttgaaatttcacgggggccagccgtggggctggggccgagccctgcctgtgttccccgacccccgcactggcccccctctgcccaccgtctcctcgctgcatttgaagacctccccccgcccttcctcttctaattgcctctgggatgaacaggggaaggaaatatctcagggcagcatagagagagagtgtgattgtgagacaataaagaagtaattaggcagatgagacacttgggggagggcccagcctgtgcccaccagctcccaggctgtgctgctggagttttggttgtggggggtggggggaggcatggctgagagccctaggccccatttgtctggatccgtgttgcacacccgccaccaccggccaccctgatccggtcccaagcttcccgggcgggctggactgggccctcagctctgtttgaagtttcgggtttctctcccgggggtagggggcttctttgtgtctacccctgcccactgtgggaggtgggggaggcagggccaaatctatcatgggaagagaaaaatctctttgtccctgagggaatgtgtcttagttcccgggcccagccccacaccccggggaggctggtttggaggcgggaaaagtgtgctttttgaggggatgcagctgggcctgggggaatcaagaagaccagctggaggggagggtgcccggggaggtttggtgaaattggggagcgccagagccccgcccaggatcccccagggcccgggcgtctgtcactctcacgcccgcgtgccgccccctggtcggtgttggctgtaatatcacatggcagccaccatgtctggggagcgggccgggggtggcattgtcctggctcagttcctaggacactggctgggagcatcctcactttatggttgaggaaactgaggcccgggcaccggctgctcagggcgagggaacgggccctggggctggtgccctccagctctgtggctcccctactgcccacggcccctccctgtccaaacctgtcactcaggagagctgccacccttgccccctgggggctgatggcccctgtgtgtggctgctgcctgctggtcacaggtttttctagttcatgctctgctgaccccacaacactcaggccagccaccctaattagccagtcagtcagctccaagggaggcagggaggccgagcctgcagggtggcttccaggcagggcatcctctcaggcccgtgggccccaagcatgctgggcaaccactcccggccattctccaagcagcctatggcctctgcaagcagcctatgggggcagagaggaggcccccccagaatagaggacctcaggattgagaaagcagagcaaggccagagggaaatcaccccctcggaccgtgcaggagggcatccggggcctggagcaggttactgagctacggtgggcaggtcctgcgccctcccaggcctcctgtctcatgagggcattgggtggagaagtcagtactaaagagaatctggattaaggatcctgctacctcacccacacttgggtcccagagacaggaaacccgagtctaaatcccaacttttcttcttattgctgtgcaacctcgagcaagttacccaacctctctgagcctccagtactccttgcccaaagtgggaaaacacagcacctccctcctagggcatctaaagcgcttggcctgtctcagggcaagccctcagtcatgcagctgggggtcccatgctacctcttcatgggaggaagggtccaaggtcctctcagggacccctctcaagaaaggctgggctgggctaagctgggtgtgagtcaggggaaacatcgttcctgctgagaggcccggggcacccagagtcccacccaggcacccagagtcccacccaggcacccagagtccagtcactctggaaagaagtttgccccagccatgcagactccccaagggctttgtgctgagggtggggctcaacgtcaggacgcacccttgcatccctggacctggcagccctgtccccctcgggatgagctcaggggaacagagcctggggaacccgtgcccctccccctctccaaaagaagccaggagacctgcggaagggagggcttgaaggcagatggctgagccattttctgcctccgtgagggctgattgaagggcaatgaggcagctaatgcgaagaaagatagaaatttacttgctttaacttcatacggtccacagtgaaagagttcattcagtcgccggcccgccatagctgatggatgaataaaccatttgcggcatcgatcatgcctctacatcatggtttagttcatgggccatttgcttccaatttctccttctcggggcctgtttcatgctttctttcgccctctccccctagcccccaccccgactctctctctctctttttcttcactctcttccctcccccgcacccccccccccccacagatgacattggaagtgagccctcccgctgggagggataaatagatggcattgatacttggcaacaaactatttgtcattagaactgggcttttaggaaggagagtaaaaagaaggcaggcgctcgagccaccgcggaatgcaaagcaaatgtcattttatttctatttagttattttatttaatcggcgctgtcaggtgcctgcccgacagctgcctctgacttccgctgcggtctgcagaaactcgtcctccagtcttcccatcccctctccttccaaatgcacacactgtcagcctccacttcggtctggggctccctcaggaagtgtggcgggagagaaagtgacaagcaacgcattgaaaacagttgacagtcgggcccagcgcaggtggaggtgggagagagctgggcttgggtgggagtggggccctcgtaccggcaccctggttggaggcttgggggagtcccaggcagctggagatggggctgtggagttgtgtggtcaccccaagatccagtccagttcactttacctttttgctgaggatgagccttgggacccgtctgtgcccagggaatgctgcagttggcagggtgggccagccctgatgcctacctgtggctgtgatgctggctggctctggccacaggcctcaccctgtttctcagcccaggttactacagcagctgggaaccagcataaggtggcggaaagagtccctgtgtttagcttccaaagcatggtttggagaagccacctctcagccttggctttccctgtggtccatagaggcatcaggctgggggtccctcagggcccctcctacctcctggagtctgtcttcagggaaggttctgggttcttgttcctgccccacaaatgggcactgatgcagggatacagctggccctgagtcacatcgtaccttggaggtgggggtggaggatccaccacagtccctgtcttagaaggatcaattgtcctggtttgcccaggactaagaggtttcttgggacaaaggactttcagtgctaaaaccaggagaaatcagggcacttggtcactctaacacagagccacaggcaaatgaccacaggtgagcttccaaggcacttatgtagccccatcccatgcagaatgaggaggaggctgggccgagcatgtacccccagagtgaatttcagctgccctttccacctgcagagcatgttcccgtttgtaccaggccttccctgacattttcctgtgtgttttcatgtccaattaaaaaatatatatatactacttaaattgtaagatggccaagggcaggtatcattttccccattttacagatgaggaaactgaggctggaggaagtgaagcttccccaaggccccccagcctgagctcttgatcctggcacggggtaatgcccatcactctaaaatacaatgtgtatttggcgaggacctcgcggggctcctgtcctgagtgccagggaacaagtcccacgtggtctctgcctgcacagaactcacagttgtagctccagtccctcccgctcagcctcaatttcttcatctgttgatggggtaagagcgcttgaccttcttaccaaatggggctgctgagaactcagactgcagatgggaagcaatacgtgaatgtgtgcaaggtgttttttttttttttttttttggtgggggggtgggggacggaatcttgctctctcacccaggctggagtgcagtggtgcaatctcggctcactgcaacctccgcctcccaggttcaagcaattctcctgcctcagcctcctgagtagctgggactacaggcgcatgccgccatacccggataatttcttttgtattttagtagagatggggtttcaccgcgttgcccaggctggtgtcgaactcctgagctcaggcagtccacccacctcagcctcccaaagtgctaggattacaggtgtgagccactgtgcccagccgtctgcaaggtttttaaagcaaagatgagacagcagttcctggatgtcagcaggtgaacaaggaccccaggcacaggatgcccacaggagggacctgagcagtcaggcccaagaggccccagtccccacagtggcaaatgtccaagccacggcctgggggagctggggcctccgaaggtgggagggaatttcgagagtttcaggcaacacgcagcccctccaccactgcatcagacgagaggcccattttccaacacgcccaagaaaaaatatacataaaggttgatgtgttttcaaatgggtttttgctttgctcttctcttttctccctgtgagtattaaccttggggaccctggggacggctcggcttgccagagcacctgctggggtcacaggcagtcattagctttgcggtcagtgcagaataaaccccaatcccgagccggcgagagcgtgcgtgccgctcctgggaagccctcggaacgccgccttgctcctccaaagtcacactttttcctgcctgacttgttcctctccagctattctacctccagctgtgggggcgtcgaagaaaaagatgagatcaagttgaggggaaaaattgtctgatttctccagccctttgtttcccaggcctctggcaagcgaggctggtgctaggctgagggctggggaccgggggatctgccggaccccaccagctggtggggaaatggacagaggagaggggtgcagatccccgcgggaggtgggctgtagggtgtccagggactggtatgtcatctgcccaccactttctgtcttttttcagaaccaagcgcctccaggtctctacacgaagacccaggacccagccaaagcccccaacacccctgacattctcgagatcgagttcaaaaaaggtatgtgcccacctgttgggactcgaagggggttgacttttggggccctggctcctttcccctccctgcctgggaacctaggccctctttacccccgccctgcattcctggaagctagagttcaggcaggggcttcaaggtaacgcacagcccacctccctggacagtacaacccatggaccatggatgcctctaggcttgggaggaacatgccctcggctacccatcactcgggttcatgggcaccaggtctggaatgagagcgctctagtccctgaacagccactcaactttcctgggcctcagtttcctcagctgtatctgaggatgaaagagtgcctgctgttttcctggggtagaatgaggcctgcaagggagcgtccagccctgggccctgaccccggaaggtgctcagtaaacggtgagtgttggcgagctggcctcatggacccctgggaccccacatggaaagccttcgccagtcttcattgagccgctctgggcctcaccctgctgaccccacgttcaaagctgcggccactcttgctcccctcggcagtggaggctgtcctgatcgctccctccttctcactgctgtcaacaagaagcgtttgctgacctggcctgagtgcctgggtgcctgagcttgggagagggcatctcttggcctggaggaaggatggagaagcgaggcatgcccgcctgggctcagagggagggctcagagggcgggctcagagggcctgaaggggtaccttttcaggaggctggagtgatcagggaggcttcctggaggaggtggtgctgggcacaggggcacccaaggaccaggcggggggctggcccattcgtccacaaagtggctgcccacactggagctgggatgagagggagagaggctcgtggagaggcctggcccggctctggcgctcggctcttaccccggctaccacagaaaggaggatagggtggggaagcctcaggccggtggggaggcagagctgcagatccccctctcccccttgctggtgtgaccttgacagccagcttcaccatgctgggccttgggtgcactcatcaaaaaacggaccacaggcatgatgctcacaggtgcccggcatggtatgtggaatggggtgtcggaggctaagtgctttaataatctgcctcttctgggcctttcccaagagcttggccaagccagcgactgtcttccttgctccccttcatctgtcccaacctactggggggccaaagaggaccccaaaggcagccgggcccccaggcctgtttgcaggcacagagcctccctttaggatcatctctgagaagatggtgggagtggccccagcagcacctcctggctccctgcacagggctcccaggagcctggagagccgtgagggtgggaggcgggtggcaggctgcggagggtcctgggcaccaggctctggcagccctgcccgaggaccagggcagctccgcaggctgagctggagaagaaacgtgacctattgtcatgatttggggactgtctggaagaagaaaaaaagaccggaggaaccctcccctggctagtgcccattcactctctagttaatttatttgaagttttaatctaattattaactattttaaaggctaagaggctttctccagcagcagcaccaacaatgtcacctcttctcccgggcaggccccatctaaggccccagcgaaggccgataataggaccggggagggagagaaagggagagaggagaggcggggggtggtgagaggggcttaaggttcattattgggcagacttacatttaatagcaatttacaaccaagttataaaacccctggaaatgggggttaagaatggcgaggctgacagcgccttgagtgaagcccctccaagcggcgcctggctaataaagcctcgaaagccgctattgaggcctgattggcacccgatggctcgctccatggtaatgagccgggcagatgggtgggggattagccgccaactttgaacagcttttctttgtcactgtttcagctctcttgttagccccaatacatttattgctcatttcacaccgctcgagaaagtgccccttgctattcaaagtcaaccccgaacccacccactgcccccacccaaccccttccctcctgccaccccggacccagctcctcggattcagggacgctgccgacacctcgcctgctggagcgggcaccgtgtcacccccatcaatcagatggctgcgtgtgggtctggggtacagggtcggggcgcggggtccgcctgacagacgtggcagggggctgtgtgtgtgtgtgtgtgtgtgtgagcgagtatgtgtgtgcttgagcccagccacacctcggccaggcggcccccgggtgactggtgggacagaaggtgctcccggcgtaagacaatggtggagcgtgaaattcaattagttcagggcctggttccaatttcacagcccctaaatgcaaaaggggcaaagagaatgggagggtgggggagagcgtttttattgcattttctctttcattctggggggctttctcgccccttctctccctgcagcaggcctcaacctgcacagggcttttgaaggagtcatttggagtccatatctgtcacatccatttaaggcgtttcgggaggagggagagggtggggtggcgggtgcagactcctccgctgagccgggcccagaggcccactgccctctcttcccaccctaggggtccctgtgaaggtgaccaacgtcaaggatggcaccacccaccagacctccttggagctcttcatgtacctgaacgaagtcgcgtgagtgtctgcagccctgtccggcctcttgggaaccgccgtctcgggcgagcacgagcctggaccgttgcagctaatggttgtggctgaggctcaggggtgcggagcacaggccatgtcccttccccatagccacagagtttcccggaccagggggacccatttggcaggagaggctccgtggtccttagccttggaagataacaaccccaggaggtctcctgcctccaagggatcattaggccggggctctcaggcccttggctggatgggaggccaggatagaaggaaagggagcagtagttagctgtggcgctaggcagggccccaggacacagggaacggaaggaacaatgtgaactcacacctgggcaatccctgctctctctgggcctcagtttccccacctgtccagtgggcacctggactaggtgacccggctcagatgtcctcttgagtcttagatcctgaaatgctgcctaatgtgtggcctaagctgtgcccaccctgggacagcccagctgggtgggtgactctgagccttgcggtagcgcccgaacctaatggaccagttcttcccacaggggcaagcatggcgtgggccgtattgacatcgtggagaaccgcttcattggaatgaagtcccgaggtgagtctgctcagcctccctcagggcctgcctcgggacccagcaaacccagagatccctgagaccctgtcccctttggacgctactacccccatgctccgtgggcgaccttgggcacgtcctttcaccacaccccgtgagaccgcagtttccctcctgccaagtggggatcgtgggccctttgcccctgactttcagggtgttatgagaagagctgtccaagggctgggagaggcccaggagggcctggggagtctccgaggagcagggaggccagggccaggcctggaggtcaggctgtcttgtgtctggggtgggcaggccgggtgtggaggcagaccgtgcaggcccgatttcgtggtcattaaggccgcatggaggccgccggccaggcagggcgaaaatcctgccaggggtgggcgctgtggctgcacaggcactgggagccggccagggcctaaggacctgtcccagcatcaggcacggctcactggcccttttctccagggatggggctgtgccacagttggggctgtgccgcagttgaggctgagcttcagtgtgacatgcctgccacctcggctggcctctagcctgcctagcctcgtatccgcctgtggctgggcccaggagcagggcagttggtccccaagcaggtgcctctgtcttctcttagtagccaaagcccatgattccctttgtcagccaatcagcatttcatcttgaccacaaccctcctctccaggactcagtttccccattcatacaccaaggggatctcagctccctgagggtctgccagtgtgtgataaagccatgctgtgttctttcttgggggtcctaagagggaaagagcaaggtttcagcagttgcagcccctgaattgggcacctgaatttttatactggtggtggggtcagggcttcctgtttcggtaaatgttcaggtctctttgcttagggttgatttgaaaagataccacaaccaaatatcacctggccacggtatagtcacggccccatgtctctcaggctatttttactaagattctaaaatccaaagagagccgatcaccccatgtgggccagaagaaaagggtggtggtccggagggcaggatgcctgcttctggtctcaggtttgccctgccttgcccaacaaccttggacttgtcatctatcgctaggcctcagtttccccaagtgtaatgcggtaggcgctgggagttgcatcactctggctctgacctgtctgcgtttccctggaaaggcatggcagcatggaccggggcggggacgggcttgcctcgaaagacatgggagcgcggaaggggaggcaggctcgcctctttcttgtggctttagctccttgcttgctgttattcaggagaaacaacctaattgaagctctggggaggccttgagaacaatgttactaattagctgctcctttttatccgggcttacctttgtctcttacctatattaacatgtgattagatgcccctttgtcgcagcctgcccttgggagccagcgcggtgtgcaccctccagggagagctgggagggaccttgaggagccacagaccagcaccccatttacagatgcggaagccagggctggggaggggtgggatagagggcttgcttcaagtcccaggcactttagtggcaggaccaggactgccatctgggcccagagtggcatggagtggagggctaacagcttagactggagttggacagatctgggttcaaactcatgtatggtggcaggaactggtacactggaagtgctccataaatagccatcagtcccccgggcatgtggaatggggacagaagcagcccccatcctctgggagctgtcagtgtggcggggggtggggtgggttccagtattgcacctgtcttatcataataagggcctgccacaggcatgcccttgccatgcctgtggcaggcatcaccagtcaatgctggcattatcctgttgactccagaggtatctcagggctgcttgcaggcactaccaaatgatcaggattggcatacgtgatgaaagtgtattgccttccctattggaaagataaggactggcctgaagtcactgtgaaatggcatcctgtggggtggggcgagtcaagcagagttgagcaaaaatgaactgaaggaggtggttagtgatgaaaacctggaatgcactattctgaatgtggaatggtagctgacagcattccacggaggctggacctttttcccagaatgggggcctcatccccgtagaaggtcaaagccatgagatcaacagtctgttccaatccccgtggctccttaccacccacctggggaaagcttcctggagcccagccttcactctgccctggtactttgtgtgtgctgttggaggctctccccaaaagcacagaatttagtcagtgtcgtacagggaagaaaatcgggattctgacggcaagaacttgctgtgtgatcttaggcaagtttctccctctggaactccaattgtcaaggggccagatgaggaggtcgtatcatctccctctgaatgtcctcactcacctattttcttgctttgggttggggagagaagacaaagttgctaggtaattttagggtggtgtcttgtttttatttctctactccaaatatttcatgtgagaaggaaagaggagagacggtaaattagggcactgtggattcccccatgacaaggtttttattaagtgtacagtaatgagagaagctgttaatcgtcaattatattgagggcagaacagaaagatgctattgtccgtatctcggtgtacaaggggaacatgtcatttgtattgattttacaaagctcgtaattgaaattcgttaagggctgatttttttctctggggggcgggggcgggtagggagttgggcagcgccagtgccctgggtctggggtggcctagtcagcggcgctcagggtcagggacagggggctggggaagccgcggctggagtagctttctccgtattgtggctgttcacatgtcattatcacattatctttttaactctggaggggggctaattaagtgaagtaaatgaaatcagtggggaggagaaggggggcaaggcaggccggagggaagccgagggaggccgggaaggagccagcgcatgtccttgtgctcagcctctttctctgtctcctctctggccccagacttctcccgccgctctcccctctccgctctcctcccagccctgcccgtctcacctctgcctgcccccgccttgctcctcctccttgccttcctttcctcctccctctctccctttcctcctccctctctccctttcctcctccttcccctcttccctcccttgcccttccctctttgcacatcctcctccccattccccactctcccctcctgtctcccttcctccttactcctccactttctggcccagaaggaacaagggctgtcacccacttgcccaacgtgcccacccaccatctggaacattccagatggagaatggagggagacctgtgaagcaaaaaggttttcagccccagaggcccacccaggatggggcccgccaggcaccaggagcatagaggatggctagagtcccaccctgactggcctcccatcaccatggcaactgcttctcaccttggccctggtacctaagaggggagcccttgggctccagccaacccctatgccccacctcttccaaatcacttcttctactttcccaaaggaccagagcctttagtccaggtgccctcacctccagcccaggccccagctgagctggcggatcccactcaattctgcaaaattgctcattctgcctaacctggcagcctcagggacagatgagaagaatttgggccacagtagctgtttggttcccacctctttctgcttggtccactctccccccagccacccctggccacccctagatccttgcccgtctccccactccccgctgcacctttcttggcagtaattatggtgtgattgaagctgctccacagagaactgctgacacctctgtctttttcctgtaaacacggggagatgaaaatagacacttggagctgctgtgtgtgtcactccaaagatgtccgttgtctcttccacggcaacacagaggctcagctgtcatttcctccttctctctgcgcagtggtttgtatgccgactgtcaaaagccccaaattcatagtcttttagcatcaggtttctgtcactgttttttttttccagaagaaacacacagaaatcatctgtaccccctacccctgtggagaggagagggaagagctttaaacgcacacacacacacacacacacacacacacacgtgcgcgcgcgcgcgtcggcagcaacctaaaaacaagttttttgatccgtcacaattaacactttcgaagaaaaggagcaggaatattaattgcactggtgtgttttgtggctgcagcctttccccttgcccgtgagccctccggaggctgcctgggagggtggcagccaggaagccggtgctgggggctcaggaagaggagggttctgcctggcctctgcccaccagacattctctgctcccggtggcactggcctcattttcctggggacacctgtgatgggccagtagctggaggaccttggacaagtcacagctcttcctcgagccctgaaccccacctgcgccctcccctctctggactgatgggaggcgatgctgtggcctcgaatgttctcgagacaagactgtcagtaagtagggcacacctggaggacgctctgaacacttacctttgaggtaggtcccaaaggaagttggaatgtcagagcagcaggaacttgcagccttcttgttttccagatgggttgcctgggtctaagagagggggctgagaccggccaaagtcacacagcaaagccaagctgggcaccttctgtaaaggccaagctgggcactttctgtaaagcatggttgtaggactcctggtgcccagctccagccctgcaaatgtagtttggactgccctacagttggccgagctgaggacagaaaagcagggaggcgggcctgggtgtctaggagttgaaaatgaggagggctcctgctaccggcctacccaggatggcgccattacgactctgtggccagtgtaaggatgggctttgcaagtttctggaattttccaaaatgtacccaaactaatcactagaaggcctgtttccaacccgatatgtatccagttctagcatgtgccaggatggaggaccagcaggactttgtcagtgtcgtgctcttgggaaattgctttatttctggtaataaggtttctaggctgattgaaaatttgctcctcgaactttatcgttatatctgccattttggagacagagatttcctgtttctgcacacactggtctttctggacacactgctgaaccattcccctttctggtggcttttttggcactgtcatgtttgtgtgcggtcatcatgttttgttttgtttctctttcagacagggtcttgttctgtcaccgaggctgtagtgcagtggtacgatcatgactcactgcagcctcaacctcctgggctccagcaatcctcccacctagcatacaccaccacacccagctaatttaccatttttttgtagagacggggtctccctatattgcctgggttggtcttgaactcctgggctgaaacgatcctcccaccttggcgtagtagctaggaccacgggcacatgccaccacgcccagctaatttttttaattttttggtagagatggggtctcactatattgcccaggctggtcttggactcagctcaagcaatcctccctccttggcctcccaaagttctgggattacaggtgtgagcccccgcatacctggcctgtgctaagttctatgtccctgttctccaggctgtctataatgacttttctcagtcattcctctgtttctgctgccatcagcctttttaccccttcctggtttgtggctctgagctactctgcagaaaatgatgacggacccatttgaactgttttacaagagtcacggtgaggcctgaggaactcccgagggatttgagggcttggatctctgcataaacttggagagaggccatttcctaatcagaggtcacaactagattcagacggtggacatgccgaaggctgcagcccccaccaatgaagcgggatgggctctttcacagcacacgatactcatatttgcacctggttgctctgaggggctttcacaagcatgtcacctgacaccagtatatcaggggtttacagatgagagaaccaagcccccagagaggttcccttctgcccaggaacacggagccatggtgagaaccaagcttttcctccacagcaacagcctggacttgggctttttctctcacgctctggttagcagttgatcactttgccaaaggcccttcgaggccacctggagctgagatgggagaccccggggccgggcccattccccctccagttggctgggtggtattaggcaagccacccccctccccaggcctcaggttctcatttgtaaaactggtgtgtgggactagatttaaggtgagtccagagtttgcagaggggcctctgttcctcccagcacaacctctgccatctcttctatatgctgggcttctgccgcaggctgtttgaatattaggttggcagctaacagtcgggagaacacggtaccggattgatcctaatgcaagctctgacatttccgtgattctaagacttaaagatcaaagactggaggagttctccaaggaggaaacttctggttagtgcacgagggctcagcagactcagcctccccagatccccggtaggcttcagagtcaaaaccaatatccttcatggtttttttttttttttaatttaaaactgtggtaaaatacatgtaacataaaatgaaccattttaaaatgcgtaagcgtgccgctcaacggcattaggtcctttcccagggctgtgccactgtgactaccgtccacctccagaacattttctttttgcaaagctgagactctggccccatgaaactccccattttccctaccccggcccctggcagccaccatttctggctgtatgattttgatgactcgagggacctcgcatgagtggaacatacagtgtttgtttttgtgcctggcctttgtcacttagcgtcacggccttatgttgatgctgtggcatgtgtcaggatttccttccttttttttttttagacagagtcttgctttgtcacccaggctggagtgcagtggtgtgaaatcagctcactgcaacctctgcctcccaggctccagtgatcctcctgcctcagcctcccaagtagctggggctacaggcatgtaccaccatgcccggctaaatttttttgttatttttagtagagacggggtttcaccatgttggccaggctggtcttgaactcctgacctgaggtgatccacctgcctcggcctcccaaagtgctagaattattacagtcatgagccactgtgcccggcccccttccttcttaaggctgaataatattccatcgtatggatggactgcattttgcttcttcactcatccctcgatggacacctgggttgcttccgcctcttggctattgtgattaatgctgctatgaacatgagtgtacaaatcctttctgggtttttttcaagcagccactgtagaaagatgttagtaaattcccaggataactgagaacctgcccttttagtgatgtaacgtatggtggaagaaaggaagctctcggggtagaatccatggagatgggggagctatggcccctgctccacccagacagcagctgcagggcaggcttgcccaagggccagctctgaagttgatgcgagaggtcgcactcctggggcaagagggggcctgggctgtgtgctgtgggcggtcctgcctcttggtgccccactgtcctccaatgcagtaggaccttcccccagacccagctcagcccaagaccaggcatttctgtctcactcggagatcatctgttccaagcaggttgttttccaaatggagggactgggcctgaggtcacaagaggggacttgagcaatcccttctcccctgaccttccagggttgggcctccacggccaggtgacttacagggcagcagacagcactggtgagggactcgggggcctacattcagttcccagctccacctagagcaagtcccttctcctcttgagctcagtttccccatctgcacggtgcggtcagcctaggtgattgcccaagccctctgccaccccagtggcctctggagagacctggccgcaggggccccatgggctgaaggtggcatgtgtgtacacatgtgtacatgtatgtgcacagctgtccccctcccctggctccctggtggaagggaagaagggatatttggggctctgggctctaccgtagtcgctttaattacaggctttcaacctcgggccggtgggcacgcatggggagggaggggttgctgctccgaaaccctgtcattttctagcgtctgagggccccttcaaagggggcatctagacattttctccacaagccgcagagtggactgtcgtggccccagcatgaacataatgacagatgcattttgcagcaagctgggagtgaatgggtccggccggcttgtctcctgtcagacgactcattattattattatttttttttttgtcatttgctgacagtttgggtttcatgcgtttctctcttttttctccttttccccctgcctggaaaaatggctaggtatctacgagaccccagcaggcaccatcctttaccatgctcatttagacatcgaggccttcaccatggaccgggaagtgcgcaaaatcaaacaaggcctgggcttgaaatttgctgagctggtgtataccggtgcgtaagactctatggctgccccctctaaccgcctcacaagggatcccaaagtactatcaggctctcgggcctggccctcccctccgtatcagcaccttcctcccctgccgcccactgccatcctcatgtgagaccccaaaaggtgcaggccaaagggggttgagggaaagtgcagggcatgagggagcaaggggatgctagaacctgccttgccatggggtgtgtccagggagatgcaccggcttcccaaggtgtccggcagcttccaccccctacagtttgcatgactgcagcaatgccaggcactgggcactgtgcggcgacatgcatcaccccgcatggtcctcacaactttcccaggaggtctgcagctccttgtacacgaggaaactgaggctcagaaggaaagcataaaaccagaagtggcctagctgggtttgacccccaagtcaggctgtctccaggaagaacctggacctactccatgaacttgagggagaggctccctggaccaggaactcagccccagaccccagtaccgcaggagccagatcttgaccatgaaaccactggggtggccacagggcctgagccctgtcacacacccagcccatgtgtggaaggaccggtgggtgacagcacctgaggcgggggtgtccccgttttgcaggtgaggagcccgggtttccatgccttggaatccaggcctcctgactccaaaatccaaccctcatgtggtgtaacagaggtccccaaactacagtccctgggtcaaatccagcccgtcacctgtttttgttcagctcatgagctaagaatagtttttacatttttattttatttatttatttatttatttatttgggacggactttcgctcttgttgcccaggctggagtgcaatggtgcgatcttggctcactgcaacctccgcctccctggttcaagcgattctcctgcctgagcctgctgagtgactgggattacaggcatgcgccaccatgcctggctagtttttgtatttttagtagagatggggtttcaccatgttggccaggctggtctcgaactcctgatctcaggtgatccgcccgtcttggcctcccaaagtgctaggattacaggcatgagccactctgtctggccagtttttacatttttaaatggttgggaggaaaaaaaattttttaatgctatttcatgacaaattatataaaattcaagtgttgccgggcacggtggctcatgccaggtgaggtggctgtttctgcattgtctgtggctcccctggagcggcaaggggaggttgagccatttgagagagaccataggacccaaagagcctaaaatattgactctctggcccttcccacccacctccataacatacacatagccctgatttggggcgttacattaaacagctgccctgagctgtgggaggacaggctgctgcctgaggccgatcctcacatcttcgggggcctggacgtcaggggacctgtgcaaagttagtattagttaatcgaatagctacctgggctaagctctcctcccctcgcctctccccctccactcccagattttgtttccttttaagcctcctaatcactgtaactcatctcaggatttcgagagggctcgatggttattggctggcgttatttctccctgccattgttccttgcagctttgaagccaagtttctgcccccgttcccagggacagacaggtgcttaaataccattgtctcctgcaggctttccagcccggcgggattgcgaccccgaaaggaggattttagttacaaagtgagagagtcattaagacgtggcggaggagagagcacctggccgggctgctccggggcctccacggaggctgatcccaccgtggccgcggccacggctgccacttatcctgccatcttgctgctaggctctgagctgggcacctgatggggtattatctaatattagctgcgcagaggtgaggaaacggaggcccccaggtgaagacactcacccaggctctcctggctggtgatgggcagctttgagccggggacaggccagctgtagcggccaagttcccagttactccaacagattccaggatgctcgtgatcaaggggcacggcggcacagacaggggaaccctgggtgtagggcacagtttggctcctggctgcggtcacgatgcctctacactggactggctgggttgagtccctgctctgacagccagcgacaagccctctacatcccaaactgaggtacaatgattaggagacttaaaaggaaacaaaatctcagagtggaggcgagggagagtaggggcttcttctgggtagttatcactaatattaactttgccctggtccgctgacatgcagggccccacaaacatcaagatcggcctcgggcagcaggctgacccccacagctcagagggcctgtttgatgcgattttccccatgagggatacagacatggtatagaccagggctttgcctgatcatgttacttaacttccctaggcctcagttttcccatctgaagagtgggaataacagttctacctgtctggtgggtgaggactaaaagtatgagtatttgtaaagcacctggaacaatgtctggcagacgagtgcttattccagtgcgtgaaataactgcgagcgcccggcgtggtttcccagtgtggaggcgcggcacttggagtcttgcctctggctgggttaatggtcttgagcagggctgtctcttccttgagcctcagtttcccctcctgtcaaataaagggcaccaggctgagggcacgccagggtctcttcccagtcccgtctagctcctgggtggaaagcccaccattctgctgtaatgcttggcttcctcagagcccttgtggtctcggcacagatagggagactgaggcacagggaagccctcctgccccagcctcactcctagaggccctaggttctgtgaccactgccactctgcatctgtgtgtctgtgtgtggctggctggctccctctcctctcccaccattcccaaatttcctggtctggctgtgtgagcttcaggcagactgtctccaggagtggcaaccagggttagcctggcaggaccccagcttcaggaccctggcagggcccagaggagcatctcatctagggggtatagctcacttcttctcccctcacctccatttcttcagcaataaaatgggtataatgtgcaactcacacagaattgctccagttagaaaggatcgcatgtgtttggctgggcctagcagcacgggggaggggtccctctccagctcagccctaagccccacccacagtgatctgcaggtctggggggtgcagggtctcccccattgcagcttatgccaggctcactggcccccaacccaggctgggtccgctgggaaaagaaatctgagcagaagaaccctgtggggcagaggtagaaaattctgagataaagcccaggccagttgctcccacagagatctctgtcctatctctggctccatctcctgcctgtcttccggcctggaaacttaatgggctaattatcccagctccgtcagaaagatggccaagcccaggacaccagggcatggggggctgggagaacatcagtggccccctccacgagggtctcggggtgtgttggaaaaagccctgggccagagttaggagtgcttcatcagacctgggctcttccaaagtcttgctgtgtggccttggacaggctctttccctctctgggcctctctccctgtgtacagtgagggctggcacagagcatcatgttcaaactgcaaatgcaaaacgctttgcgctctgtgcattccctcactgcatccacacaacctctggttagcaatgttttctcactgtgcaaatgaggaaaccgaggcacagggaggttaatcacttgtccaggtgtggctgggatgcggactcacagggtgggacactggagagcaaggactcaacctctactctccgtgcttggccctcccccgcctctgcaagccccaggaccccatcccagaagcctgtcccctttcccacggaggacctctgcaggtgcccccaggggcctgggcctcccacaatagccgcagcccctgggctgacccagccctttatcagggcaggagatcatgcgccatctggccctgcagctgcccaggtgggctcaccttccaggctccatttcaggaaactctagccttgccctgtccctccccccgccatggcctgcctgcctgcctgcctgcctgccccttggtcccagcctccatcagcagaggctagagagaggccgggggcagactggggtctgagcgctacccctccctggcctttagggctctcggggagaggggagggagcatgtttctcaggcacctcctgcccccacctacacaccaagggatgttctggccatagagaaagctccaagtttatcataggaagcagagttgttacaacttgggccaacacaagtcaaatggaggctccccacttccggcctgtgtgatcctggagaagtttcttaacttctctgagcctcccttcctcacccagaaaggggagaggctaagagagtttctctcagagtgctgtctatgaggattcagggagctagcccagatcaaagcctgagcgcagtgctgcttatctatgcagaaatattctatctgcccaggaaaacagcagcaggtgcagaaaacagctcactgattccaaggggtgggctctggccaggactccagttcacagtagcccctaaggctggtgctgctcagtgctaggggctccacatgaaatattactgtgacatccccactcaacagatggggaaacagaggcacagagaggggaaggctatgcatggccatggtctgaaccaccacccagctgcctgcactggacacccatatcaccaagccccaggcagcatgtgcctctgagtcctgtctgaggtcttctgcctcccccggagattagagcctccattgggccagggatggggtccctttaccactgtgtccccagttgctggcctgtggcacttcctgaatgcctatggcatgaagcagtgggtcacttccctcctcctgacccttagggaaatgacctaggtggtcacctccttacccacaggccctttgcaaggttagagggcagggctatgaaagcatggtcctcaactcagccactggcaagcgcacattgtgccagtctcgcgggaggcagtcatggtctgcatggcggggtaaaccatggggcacccttcctgtgccccaggtctccctgtgtcctcgcggtgcaggaggcctccctagtggtatcctgttttcctccctgtaggtttctggcacagccctgagtgtgaatttgtccgccactgcatcgccaagtcccaggagcgagtggaagggaaagtgcaggtgtccgtcctcaagggccaggtgtacatcctcggccgggagtccccactgtctctctacaatgaggagctggtgaggtaggtgccccacacctcattctgacccccacttgggcacagagcctatcttttgactggatcctcaagacatctgtgcctgagcacatgtcaggcaccatgcagagcacagagtgatggtcacagaggatatagacaccactatgctcccgtggaacttacaggctagctgggagaaaggcatggatcaaaccattaccagaatgtagaattagacaaggtggcagcgggctgtgaggaatgcaggatagtctggctgggtataataactgggattggctaggaggggtggtgcatgcctgtaatttcagctactcaggaggccgaggtgggaagattgcttgagcccaggagttcaagaccagcctaggcaacatagaaagaccttgtctcaaaaaaatatatatacacacacacatacatatatatatatatatacacatacatatacacacacacacacacacacacacacacatatatatataaaataattggggttgtgaagaagctcctttgctattcaaacaatagcagaaggagttaacaggtgaatggggggaggggtggaagggcaaaagtggccagggggaaggagctgaagctagatcttaaagggaagggcaagatcagatctgtgcatttagagggtcctcctggctgctctggagaacggatttgagtaggtgggaggtggaagggcacctgtggaaatgcggtagcttggaccatgctgatgattcctggactagatagcagcaggcgaatgtgacacatatctaggaggagggattgaaatgacttggatgtggagggagatggagggtccagaatcaccctggtgtctggggtcgtgagcagctgggtgcagtccctgggttgaggaaatgctcttgaggaaggatcatgcatttggatttaggtgtcatgagtatgggtttcttttgagatagctgggaaaaactaactggaaggccgccggacacttgggtctagagttgaggagaacccaggctgaagaccctggagcatcataggcattttgatgttctctgaagcgctgggccaagagagactgcctaggggaaagcgtggagtgagacaagaagggaactagccaggcaagatggtgcacacctgtaatcccaactctttgggaggccaaggcaggaggatcgcttgaggccaggagttcaagaccagcctgggcaacatagtgagacctcatctctactaaaaataaaaaaattagctaagcgtggtggcatgtgctcgtggtcccaactacttgggaggctgaggtgggagcgtctcttgagtctgtgagatcaagggcgcattgagccatgatcatgccactgcactccagcctgggcaacacagcaaaaccctgtctcaaaaaataaatacataaagtattagccaggtgtggtggcatgcacctgtagtcccagctactcaggaggctgaggcaggaggatcacttgagcccaggagctggaggctgcagtgagccaggattgcaccgctgcactctaaccttagtaacaaagctaggcactgtctctttaaaaaaaaaaaaaaaaaaaaaaaaggaaacacaactggaaccatgagatttctcattgatggaccaggcagaaggtggccaaggaggagcccctggaggggcaggagggccctggtgagccagggcaaaggtggcaggtaacgattggccactcctgtgtccgccccgtggatgagagtgacctgcaccaagggacgaggtgtcacctccagaggtcacctggccaaactagagatggggcaggcccctgtgggacagacagcccccactagacgtgggtcccctaaggcccagcttagctcaggctaaggccagcccctccctcctggaggctggttgggaattaaagtacgagtcttgtttggcagtcaatattatttttttctttcccttctccttgccatgttgagtttctccccgcttcaatctttctaaacactttataagccataaatacaactgagtcagtttagatcagttggggtaaatgtcaaattatcttctctctttctctctctggctctttcttccctccccctccaaatcaacagcctctaataatctgtccaacccttcattaagccttacagtctcactcagggagattaaatgaataaagtaaaaagggaaaggggaaaaaagagagaaaagcaggagcatttattctcactgtgtctccgaccatttcccttttctttttgatttctacatcgctgacttgaaagcccttgagtgacagcgtcacagggaccagcgaggaagccgtgagaggtagcagagctggaaatgccgtggctcagtaggtagaaagtaacgtaattatagagcaggtcagagccactcgaatgagcaaaaataaaagcacagaggttttctgtagaccgtcaggggaggtaaaaaaaaaaaaagaaaaaaatcattgtaaactctttttccacctccccgctcacttcaaaccacaattttaaaaagaggttttttagttcctgagaaacccctcttggaactcccagcagcctcgtgggacaagtttgtccctggatgtgggccctctttgcaggggctgccagggcagctgggaagttcccaccttggggaacgggatggggagagtttgttgtgacttgtgagagatggaggtgaagggacagatggacacagaggtggggggattctgtgtcctacgttctccctgggctgagtataggggccagtggggctgaggctcggtttctaaaacaaggtctgttgaagggatctgaggaggttggtggtctagtttggtctagctcttcctaagcactgactgcacagaaaggggtggccagcaaaagtctggtatctcctcctcttccagggaatgcaagctcctagtggcttcagtgcctgagccctggaggggccgtggaggtgtggaggagggaggaagggacatcaaggaggtacaggagcatgggagtgactctgcagagagttccacgcacccaccggcttcaaggcctggtgaaggtcagggcccgggtcctgaacaaatcactggggccaggcagatgcagagacctcatttgttcttgtaaaaagtccactgtctacaaagaaccagtcagagggccagcctcagggtctcaaagcagcagatcctcctgcctcccaacaccgacccccgctacccctacctcgagaaccttgagtcagctttgtcccaaggctggaattctgcagacaagggtctgattcagagcaggacatgacaagggaccccatcctctcagaggctcagaggctggccttgtggagtaggaggcatctgagtccacgtgccctaagtgcttagcacaaccataattaatgaaggcaatgggtgattgattgcttcggtctggcccctccctgtggacaccactcttgctcttccttccttggcacctggcccagcatctggcaggcagcaagggcttaataaatgcctgaacaaatgaatgagtgaatgaatactgttagtactagtgggtgctcaccatgtgccaggcaccagctacattatttcatgtggggccaaatgtgacactgagagctaaccaccatcacgcatttcacaagtgcaaggctgaggctccgagtgcaggaatactggcctgggctctctggtggcgggtggcggaaacaggacgcaaaccccagtcagctggctggagtgactgccatggttaggaaggttgggaggagcagctaagggtggagagccccaaagcagaaggctggtgagtctgagaggtggaaactgtagagaggtaaaatctgctctgctgagtacagcagcagtcaacccagcattttccatgacacactggcagtgggtgcccaggtttcaggatggattaggtaaggtctaactggttggacacatgaggggaaaggtgacttggtgggcccatctcgctgtgaatgctggaggcctccctgcagcttgcgaaatgcccttgtgctattgcaattcacaccccaaggcctcctgagccttcaggtcactgcatgccatccacacagtcccaagggcacagctggcttggacgagttacccatttacagacagagtgctctggttggtggaattcatagggctagttctggggtggctgctcctagcctcctgccacattgtgtagcagggaagaggctgctgtgtgctccactagggctctccaacctttgggtgggtgcctggcccagaacagggttccctgagttgtacagaaattcaatggaaagccgacgtgcagggagggtttggacccacacaggggaaatgccctggcatctgggaggtggggctgcttctggccccagcagtcctcccttcaagcagaggccagggccaggctgagctgacaagcttctactctccttgcagcatgaacgtgcagggtgattatgagccaactgatgccaccgggttcatcaacatcaattccctcaggtgagaagctcagggccctgacgggccttcagagcctccaggtgtaaagggtaggctttgagagcccccaggtgtaaagggtaggctttgatgcgaccttgactgctgccctgccctgccctgccctgccctagacaaaccccactttcctgtccatctgcccatagcatcctcagaagcatgctttgatagccgacagtaacagagggtcctaggcattggggtcctaggttcctgtgtcccaccgggtgcctctgatacttgccctcccctcccgctaagccacagggactccactatgagctcctttgcagggcaggttaaacaaggaaatagcatagaggtggagagaagcctttgttttctgtcaccatacctgagctgtaggtctagctggaagccatcctagccacgtggatctccatggcccaggagggtggtgcacgtcatctgaagtcactcagacctttgatcctctgtgagtcaccagtaagagtgtcagctgtacctgcctcacagatgcagtgaaggttcaatatgagcctgtggaaatcaagcatgcggctcaggcttagaccctggcatgcaggaagagccaggggcagtgccagcagcaagcacactcagcccagggccggtgtgctcaagggcaaacagggtcgtttgtcaccagcagctaacatagactaagctgctctgggacactctcctaggatgtctcatttaattcttacacaaaatttgcaactccccgggaacaggctgagtggttaagtaactttccaagggtcacacagctaggaggtggtggagctgagtccggagggcctgtcctgctgtgggttctccatcaccagctcccttctcatggggattggagtctagaagaagatgcaagtcagtctcctcttgctaacaacatgccctgggcacagagccatcattttctcccagagccagtctcttgtccctggaggcacctcatgccccgagagatgttgaagcccgcccatctgcccagggtcctctcccttcccctccgtcacctccacctcccctgcctcctgcgccctctgtttgtattttatgactctataaacccttttaaatggcccagaacaaacagggcttacatagtggcctcttcatttctcctattgccagttaaacgctttgtcttcaacaatgacaaacaatgttttccccctaagataaattaattacattatcctgattggagggcaggaggggccagggcgggagagggaatagaaaaaaaggcaacttcacacacatcttaacaaacagctgccccagccaccccagctctgcctgaattaattgaacccagtgtgtgttgttattgttaatttacatttttctttgttttgaatctggtttacaggctgaaggaatatcatcgtctccagagcaaggtcactgccaaatagacccgtgtacaatgaggagctggggcctcctcaatttgcagatcccccaagtacaggcgctaattgttgtgataatttgtaattgtgacttgttctccccggctggcagcgtagtggggctgccaggccccagctttgttccctggtccccctgaagcctgcaaacgttgtcatcgaagggaagggtggggggcagctgcggtggggagctataaaaatgacaattaaaagagacactagtcttttatttctagtgagtgtgtgtgtgtgtgtgtgtgtgtgtgtgtgtgtgtgtgtgtgtgtagttaattatggttttcttaggccaacctttgtgttttcggacctaagtgctgccgaaggccgccatttgccagacagcctgttaatctggcagtcgacccctctccagcaaaaactaggaatccagaagtgccgcctgggtccgatcctagccagcatcctgggaatctgtcaccaactgtggtcctgtggcaaatgtcaggaaaccaaataaaattcagggaatgccctttgggggcatcaacgcacagccctttctctggacatcacttttactcacagcccacagggagcttctatagagggtggccatgagtgaccctaggacacttaccacagctgcatggcctaaagcagcctaaatcatgaaggaggagggagaggcctgagcagagaggagaaaagagcaagcccggaacttggcagcatttctcattgtccacaaaccaggccctaaagcagccatgtttgtagtgtggccctggccccccttggtcatatctgattggaccgtggatggacacctgactcgagctggccaatcagaacccgcaggaattgggcctcggcacgtggccgaagtgaggacatgtaacacaggcactcaccgctgggatgctgtggacctggggcacagagcaggtgtagaaggaaaggagagggaagagatgggaagagagggtcatggtattggcgtccatatttctgtactggtgcttcatgaaagctggtggcatctcttggcctggtttccctgacacctgatatcataacgaattcaggactccagctcagtgagagagtttctgctccttgcaaccaaaagcatcttcactgggaagacttgagtgccgcttgctctgtgctttgccctggttctgaactcagaacctgacctcagggatcgcttcgccactccgctgcctgtgtccatgagggtttctcgcaaaagaagttttacctttaaaacttattttcctctgattattaatgtccgtggtaataataaatgactcaatattagctttgtgccaaacacttcgctacacactttattcacattatctcattgaatcttcaaaaccacacttggaggtggacactttcatctccataatgtagaggtagcaacgaagctgcagataaactgacttgccaaaagccactgagctagcaagtgacagaaccaagaaccaaaccccggcctggctgagtccccaaatcttgtgcgtttgtcttgttgttgttgttaagatggagtctcgctctgtcactcgggctggaatgcagtagcgcaatctcggctcactgcaacttccgcctcccaggttcaagcgattctcctgcctcagccttctgagtagctgggattacagacgcccaccaccacgcctggttaatttttgtatttttggtagagacggagtttcatcatgttggtcaggctggtctcgaactcctgatgtcaggtgattcacccacctccggcctcccagagtgctgggattacaggcgtgagccactgcacctggccattatgtctttaaccatagtgataagctgcatctttaagaaaagaaataactagccaggcacggaggctctcccctttaatcccaaaactttgggaggccgaggcgggtggatcacaaggctacgagttcaagaccagccagtttgagaccagcctggcctcggcctcccagagtgctgggattacaggcaggagccacgacgcccagccacatttggtatattatcagtcatatgtctttttcttttctttttttgttttttggctaaacatcctataatgcacatatattttttcctatgcttacaatatttttgcagttatttaggctaaagtataaatgctttatattttatagttataaatgtatactttatactttaaagtataaactttagccgggcacggtggctcatgcctgtaatcccaacactttgggaggccgaggcaggcggatcatgaggtcaggagattgagactgtcctggctaacacggtgaaaccccgtctctactaaaaatacaaaaaattagccggacacggtggtgggcacctgtagtcccagctactcaggaggctgaggcaggagaatggtgtaaacctgggaggcagagcttgcagtgagccaagattgcgccactgcactccagcctgggtgacagagcgagactccgtctcaaaaaataataataataaagtataaactttatatatttatgctttaatgtatatactttgcaccctatttttaaaattttaacatatcataaatgctttcctataacatttaaaaactcaatccttaagcctgggcgcagaggttcatgcctataatcccagcactttgggaggccgaggtgggtggatcgcttgagtgcaggagtttaagaccagcctgaccaacatagcgagaccccatctccataaaataaataaataaataaatttttaaaactccttaaacattttcagcgattacataatattttgttaacattgatactccctaacttaacctttccccatttatatatttagttctctccatattctaaattatttttctgccttttgttgaatttatcttttatattttaaataaatagagatggagtctcactatgttgcccaggctggcctcaaactcctgggctcaagtgattcacctgcctcagcctcccaaagtgctgggattacaggcatgagccaccatgcccagcccttttgttgaatttaatggaatgtttttaagaattggttattagctatacttaattattagttatggcttttttagtgccctctctgagagttattttatatatctttaacttaccacagtctaccttcaattaatagtatgccacctcgagtgtaacataagaactctgcgacagtacgagcctagaacatttcactttatgcttttgttgtcatacatatgctacaaaatcccataatacattgctattatttttgctttagacagtcaaatatcacttttaaaagattaaaaataaaaataaaaaaaagattttaaaagatgaaaaataatggtgggccatgcctataatcctagcactttgggaggccaaggtaggaggattgcttaagcccagggattcaagaccagcctgggcaacatagggagaccccatctttacaaaaaattttaaaattagccaagtgtggtagcacatgctggtggttccagctactcaggagactgaggtgggaggatcgcatgagcctgggaggtagagactgcagtgaggtgtgatcacagcactgtaccctaggctgggcaacatctcaagactctgtctcaaaaaataaaaataaacagctgagattgcaccgctgcactccagcctgggtgacagaatgagactctgcctcaaaaaatcataataataataaataaagattaaaaataagaaaagagtttatcttatatttatccatatatttctttttctgatgcccttcattccattgaatagacaaagtttctatatatatcattttccttctgttgaagaacttttaaaagtatttcttctagtgcagtgattaattctttcagttttttttgtttttgtttttgttttttgagacagaagctcactctgttacccaggctggtgtgcagtggcgtgatttccgctcaccccaacctctgcctcttgggttcaagcgattctcctgcctcggcctcccgagtagctgggattacaggcccccaccaccacgctggcaaatttttgtgttttttagtagagatggagtttcaccatttggccaggctggtatcaaactcctgacctcaaacgacccatccacctcagcctcccaaagtgctgggattataggcatgagccaccccaccaggcccagcttttatttctttgaaaaaattttattaacatttacaagtaggtccttgctccatttcgagttcattactgtgtaggttgtgattcaggatcaaagtttattttttgaaaatactgatgttttgctgttccagcaccgtttcttaaaaagtctttttcctattatattaccttagcatctttgtcaaaaatcaattgattaggccaggcatggtggctcacccctgtaatcccagcactttgggaggccaacgtaggcagatcacctgaggtcaacagttggagaccagcctggccaacatggtgaaaccccatctctgctgaaaatataaaaattagccggccatggtggcgcaagcctgtagtcccagctgcttgggaggctgaggcatgagaatcacttgaacacggaaggcagtggttgcagtgagccaagatcgcaccactgcactccaccctgggcaacagagcgagactccgtctcaagaaaacaacaacaacaacaatcagttgatgggtatgggtctacttctggactctcaattctgcttcattaatgtatgtgtctagccttacgccaaaaactctctgacttgcttattatagcctatagtaaatcttttttttttttctgatttatttatttatttatttatttattgatcattcttgggtgtttctcgcagagggggatttggcagggtcacaggacaatagtggagggaaggtcagcagataaacaagtgaacaaaggtctctggttttcctaggcagaggaccctgcggccttccgcagtgtttgtgtccctgggtacttgagattagggagtggtgatgactcttaacgagcatgctgccttcaagcgtctgtttaacaaagcacatcttgcaccgcccttaatccatttaaccctaagtggacacagcacatgtttcagagagcacagggttgggggtaaggtcaccgatcaacaggatcccaaggcagaagaatttttcttagtacagaacaaaatgaaaagtctcccatgtctacctctttctacacagacacggcaaccatccgatttctcaatcttttccccacgtttcccccctttctattccacaaaattgccattgtcatcatggcccgttctcaatgagctgttgggtacacctcccagacggggtcgtggccgggcagaggggctcctcacttcccagtaggggcggccgggcagaggcgcccctcacctcccggatggggcggctggccgggcggggggctgacccccccccacctccctcccggacggggcggctggccaggcggggggctgacccccccacctccctcccggatggggtggctgccgggcggagacgctcctcacttcccagacggggtggctgccgggcggaggggctcctcacttctcagacggggcggctgctgggcggaggggctcctcacttctcagacagggcggttgccaggcagagggtctcctcacttagacggggcggccgggcagagacgctcctcacttcctagatgggaaggcggccgggaagaggcgctcctcacttcctagatggggtggcggctgggcagagacgctcctcactttccagactgggcagccaggcagaggggctcctcacatcccagacgatgggcggccaggcagagatgctcctcacttcccagacggggtggcggcggggcagaggctgcactctcggcactttgggaggccaaggcaggctgctgggaggtggatgttgtagcgagccgagatcacgccactgcactccagcctgggcaccattgagcactgagtgaaggagactccgtctgcaatcccagcacctcgggaggccgaggctggcggatcactcgcggttaggagctggagaccagcccggccaacacagcgaaaccccgtctccaccaaaaaaatacgaaaaccagtcaggcgtggcggcgcgcgcctgcaattgcaggcactaggcaggctgaggcaggagaatcaggcagggaggttgcagtgagccgagatggcagcagtacagtccagcttcggctcggcatcagagggagaccgtggaaagaggggagagggagagggacagggagagggacagggagagggagagggagagggagagggaaaaaaaaaagcgcctatagtaaatcttaaacctcattcttttaagactgttttggctattctgagtcctttacttttccatatactttttttttttttttttgagacagtctccatctgtcacccaggctggagtgcagcagtggtgccgtcttgcctcactgcagcctccgccttttgggttcaaccaattctccggcctcagccacctgagtagctgggattacaggtgtgcaccaccatatccagctaatttttgtatttttaatagagacggggtttcaccacgttggccaggctggtctcgaactcctgacctcaagtgatccactcacctcggcctcccaaagtgctgggattacaggcgtgagccacctgcccagcccatatatgtgtgtgtgtgtgtgtgtgtgtgtgtgtgtgtatatatatatatatatatatatatatacactttttttttttttgagatggagtctcactcttgtcgcccagactggagtgcagtggtgcgatctcagctcactgcaacctccaccttctggcttcaagcgattctcctgcctcagcctcctgagtagctgggattacaggtgacccccaccacgcccggctaatttttgtacttttagtagagatggggttttgccatgttgggcaggctggtcttgaactcctgacctcagcctccaccacctcccaaagtgctgggattataggcgtgagacactgtgcgtggccccatataaattttttaaacaaattattcacttcttcaaaaagtctgctaagatttcattggaattgcattaaaacaacagattcatttgaagagcattgtcatctgagttactccattactattgctataaaggaatgcctgagactatttataaagaaaaggggtttattttggtttatgcaggctctacaggaagcatagtgctgggatctgctcctggtgagacctcaggaggcttccaatcatcactcctggaagcttccaattatggtagaaggtgaagggggatacagaaggttttatcagatggcaagagagagagcaagagagagagggagaggttccaggctcctttttaaacaacaagatcccaggcgcagtggctcacacctgtaaacccagcactttgggaggccaaggtgcttgaggtcaggagttagagaccagcctggcaacatgacgaagccccgtctctactaaaaatacaaaaattagccgggtgtggtggcgcacaactgtaattccagctactccagaggctgaggcacgagaatcgcttgaacccgggaggcagaggttgcagtgagttgagatcgcaccattgcactccagcctgggcaaaagagcaagattctgtctcaaaaaaattaaaaataaacaaccagatcttgtgtgaactcattattgtggttaatttttttgcatatgtatatatctctctctctcaaaattgggagttgaattttgtcaaatgtttctcaacatcctttgagatgttttctcctgtattctgttaatataatgaattacattaattgatttttgaatgttaaaccaattttacattcacaggaaaaataccatttggtattgctggatttagtttgctaaaattttgtcagagattttttgtgtctatattcatgtgggatgtggatctgtagttctcttgtggttctttggtttttgtgtcagggagagagtggccccccaaaaaatacattcagaaatgtctctccacctcctgttttctaaaacagcttttttgtaggattggtaatattctttcataaacgtttcatagaattcaccagtggaaggccagccatggtgactcatgtctgtaatcccagcactttgggaggctgaggtgggaggattgcttgagcccaggagttcaagacaatcctgggcaacatagcaagacccctatctctgcaagggaacaaaaagaaaaagaaaaaagaattcaccagtgaagccatctgagcctggaaatttttatgtgtgtgaggcttttatttttttatttttatttatttatttcttttcttgagacggagtcttgctcttgtctcccagtctggagtgcaatggcatgatcttggctcagtgcaacctctgcctcctgggttcaagtgattctcctgcctcaacctgccaagtagctgggattacaggcatctgccaccatgcccagctaattttttgtacttttagtagaggtggggtttcaccatgttggccaggctggtctcaaactcctggcctcaggtgatccacccaccacagcctcccaaagtgccgggattacaggcgtgagccactgtgcccagccttaggcttttaaaaaataaatttggccaggtgcagtggctcacgcctgtaattccaacactttgggaggccaaggcgggcagatcacttgagtccaggtgctcaagaccagcctggccaacatggcaaaaccctatctccactaaaaatacaaaaattagccaagtgtggtggtgcacgcctgcaatctcagctacttgggagactgaggttgcagcaagttgagattctgccagtgcagactctgtctcaaataaaataaaataaaataaaatattcagtttctttgatttatgtaaggctatttaagttgtctatttcctcttggatcaactttggtaatttgtatcttttgagggatttaaccatttcatctaggttttcaattttattagcagaaagtttttttataattttcctgacctcaagtgatccacctgcctaggcctcccaaagtgttgagattacaggcatgaaccaccatgcctggccctggccctttctaggttttctgcttaatgattcttatattcagtgaagtctgtctactctggctgggggaaactcaaaataattctcagtcctgtatgagattcttagtaattttttttccctcaaaagctgctcttggctgggcacggtggctcacacctgtaatcccagcactttgggaggctgaggcgggcagatcacgaggtcaggagtttgagaccaggctggccaacatgatgtaaccccgtctccactaaaaatacaaaaattagccaggcatggtggtgcgttcctataattccagcttcttgggaagctgatgcagaagagttgcttgaacctgggaggtggaggttgcagtgagccaagatcgtgccactgcactccagcctgggcgacagagcaagactccatctcgggggaaaaaaaaagttgctcttgtctggtctcatggggtttttctctatacatgaggagattggcatccaccaaagactcaaatggacacttcacagattgctggaggcctttctcctgtagtgccctccgtgctggttgtgagtcccacagatttcagctgtgttggcttccccaaaccccatctgtcttctcagcttggcatgatcaccggactctgtctcctccctattttgcagttttggaattacctccaagcagaaagctaggtgatgatagggcttgccctgttagtttcccttttctcaggaatcacagccctgtactacctgttgttgaatgtctgaaaatagttgttccttgtgttttgtacaattatctgttgtttacagtgggagtataattctggactgcctcagtcctttgtggacagaaatgaaagtggattttttttttttctgagacagagtcttgctctgttactcaggctagagtgcactgtgatcgcagctcactgaaacctcaaaatccagggctcaagtcatccccccacctcagcctcctaagtagctgggactgcaggcatgcaccattacacccagctacgttttgtatttttcatagagacatgaaaaacggctcactgcaacctccatctcccaggttcaagcaattcttgtgcctcagccacctgagtagctgggattacaagcacacaccaccatgcccggctaatttttgtatttttagcagagacaggttttgccatattgcccagatggcctcaaactcctggcctcaagtgatccacctgccatgttgcccaggctggtcttaaactcctgtgctcaagcgatccccacatcttggcctctcaaagtgctgggattacaggcgtgagccactgcacctggcctaatgtttttcaatataacaataatataatctaaatgcctataggccagcctggcctgagatcacacttaatatcttgctaacatgaatcatgtagtttctcatcctaactgacattccacccctcactggctcccatctcactcaacataaaacccaaagtgcttactacagccagcaccaactaccagccatgaaagtgagactacacgggaactgccctccgcagacaagcctgacagcagctgcctgaatcatcccacatgagactagcaaaagaactgcctaggcagctcacctataggctcgtgagaaagaataaataagttttattttgattattattattttgtttttatttcaatagtttttggggtacaggattattgcttacatggataagttctttagcggtgatttatgagatttgagtgtaccattacctgaacagtgtacattgcatccaatgtagacactaagttttctggttgtttatgatgcagcaacacagataattgatgcatttattatggcctaccagcactttcatgatctggcccccacctactgtccgtcctctcctccctcctgctccctctcacctctgcccactgtcttcaaacaatccaagctccgcctggaacatcttccaccaaatagccacaagactcactcattacagcccaaatatggcactgactatacctttatcctgcctccctcttctccacagcacataccaccaccaaacatatgcactggtttgctttgtgtatctagtaatttttttattgaatgctggacattgttgagtatctctcccactagataggaagctccatgtgggcagagaccatgtctgccttatttgcagctgtgtaccagatgctaaaaccacgcctggtccataacaggtattcaattaatatttgttgaatgagttgaatattcatcctcgagtgggctcagaaccccacttgaggagcgtcaggaatacatacttcctcccctgctccaggagcccataaaatggtgcctaggtattcagaagctattccaatccagtcctcatgccacagcccagggcctgccctcattcacttctttgtccctcctgtcactcctctccagtcactgcctacactcttgacatgctgttgcccctgctgtcaacacaaatgaccccagctccactgagaagtgggtaggaaaccaccacctcagggaagctatggtaggtttgcttggacacggagatgttagaactcttagctcttcatgtatgcagcccctctccacctgggcatgccagtgtagccaaatgatcttgattggtgatagtttcaacaaacagcctccagctgtcaccagaaccacttgtcctccagctctcatatcctattgcggggattagcttattaggactgactctgccttctctcagagtaaattctgtctttggtagaccctcgatcctcctaccccctggctataaggcttccacggagttgcccccagactgccactgaagactgggtatgtctgaacccaggtcactcccaacattgaaaatcttttctaggaatgtccttagtcctcaagtcaatctagaaacacagatcaatactagggtgtaaataggattgttgctatctcacaaccatagtttagtggttgtttatgatgcaacaacttacccatgtaagcaataatcctgcaccccaaaaactatggaaataaaaataaaataataattaaaataaaaccttatttagtctttctcagagtgtccaaatagaataatattgaaaaattaaagactcagaaaaataattacattttttgttttgttttgttttttgaaacagaatctcactctgttgcccaggctggagtgcagtggcattatcctggctcactgcaacctccacctcccggtttcaagcaattgttgtgcctcagccacctgagtagttgggattacaagcgcacaccaacatgcccggctaatttttgtatttttagcagagacaggttttgccatattgcccaggatggtctcaaactcctggcctcaaatgatccaccagcctcagcctcccaaagtgctgggattacaggtgtgagccaccatgcctggcccagaaaaaattttttatttctgattccaacatctttatcaaaatgttttggttaatattcagatgcatttcctgccagtcattctttcatatgcacattcgtttacaggcatgtcaggtagtctgtttacattgtgtacctgtgcatttggttttttgtttttcgggtttttttttttttgagacagagtcttgctctgtcacccaggctggggtgcagcagcgcgatctcggctcactgcaacctccacctcccaggttcaagcgattctcccgcctcagcctcccatgtagcagggattacaggcacatgccaccacacctggctaatttttgtatttttagtagagacggggtttcaccatgttggtcaggctggtctcaaactgctggcctcgtgatccacctgcctcagcctcccaaagtgctgggattacaggtgtgagccaccacgcctggcctctgcgcatttgtttcatttaacataataaaagaattaattttccacattgttgataggctccagaaccaacttgaattgtacacttaaaattggcctattttgtatgatgtgtaagttacacatcaataaagctgttaaaagcaaggctcaatggctcacttctgcagtcccagcgctttgcaaggtagaggcggcaggatcacttgagaccaggagtttaagaccagcctgggcaacatagtgcacactcatctctgccaaaaaaaaaaagaaagccaggtatggtgactcacgcctgtaatcccagcagtttgggaggccaaggcaggcggatcacttgaggtcaggagttcaagaccaacctagccaacatggtgaaaccctgtctgtactaaaagttacaaaaattagccgggtgtggtggcacgcacctgtaatcccagctacttgggaggctgaagcaaaagaatcacttgaaccagggaggcagatgttgcagtgagccgaggtcgtgccactatactccagcctgggcaacagaggaagactccatctcaaaaaaaagaaaagaaaagaaaaaaaaattacctggatgtggtgatgcacaactgtagtccctgtcgaggaggctgagatgggaggtttgcttgagcccaggagattaaggctgtggcgatcacaccactgcccccctgccttagtgacagacaaagatcccctctcaaataaatagataaatagatctgttaaaaataaatatatgtatatttttgagacagggtctcactctatcacccaggctggagtccagtggtaccatcacagctcactgaagcctcctgctcccgggctcaagtgattctcccatctcagcctcctgagtagcggggactacaggtgtgtgtcaccatacccagctaacttttttttttttttttagtagagatgggttttcattatgttgcccaggttggtctcaaactcctgggctcaagcaatccccccaccttggcctcccaaagtcctgggattacaggggtgagccaccctacccagccaaaaacataaataaataattttttaatataagcgggagaaagatggccaatgttaaagaaaggcattgagaagagcttgggctagcaaagtgcagggctggagcagaagggggaggagaggaggcatctgggcagagtggagccgaggatcctcaaggcaactgtgggcaaggcagctgggatgaggggaggggcaggatgctggacaggcactttggcctttaaggaaggtgacgtggggtgtagagtgaaaggggagagccccagctcagggaccagacttaggttacacatattaaatcctggttccttcctctttcatggtgagagcttgggctaggactttacctccttgaacctcagtttctccatctgtaggataggatcgtaatggcccttccttccagggctattggaggttccaggaggcccacagtgggccatcaggaacgggagcctgatctcggtcactattccacagggctttccacagcattaaggaagctggtcaagacaaataactgcctgactggctgggtgtggtggctcacacctgtaatcccagtactttgggaggccgaggtaggcagatcacctgacgtcaggagtttgagaccaccctggccaacatggcgaaaccctgtctctactaaaaatacaaaaattagccgggcgtggtggcaggtgcctgtaatcccagctactccggaggctaaggcaagagaatcacttgaactcaggaggcagaggttgccatgagccaagatcatgccactgcactccagcctgggcgacagagtgagaatctgtctctaaataaataaataaatactgcctgatcttgccaggctcacacctgtaatcccagtactttgggaggccaaggtgggtgaatcgcttaagcccaggagtccaagaccagactgggcaacatagtgaaaccccgtgtcttccaaaaatacaaaattagccagccgtgggggcacacacctgtggtcccagctactcaggaggctgaggcaggaggatcatttgagcctgggaggtccaggctgcagtgagccatgattgtgccactgcactttagcctaggcaacagagtgaaaccctgtctcaaaaaataaaaacatctggccaggcacagtggctcacacctgtaaccccagcatttagggaggctgaggcaggtggatcacctgaggtcaggagttcgagaccagcccggccaacatggtgaaaccccatctctaaaatttgtaatgtttgtaaaaatacaaaaattagccaggcgtggtggtgcatgcctgtaatcccagctacttgggaggctgaggcagaagaattccttgaacccaggaggcggaggttgcagtgagccgagattgtgctgctgcactccagccttgcaacaagagcgagactcctctaaataaataaatacataaatacataaataaatacataaataaataaataagccaggcgtggtggctcacacctgtaatcccagcactttgggaggctgaggcggccagatcacgaggtcaggagtttgagaccagcctggccaacatggtgaaaccccatccctactaaaaatacaaaaattagctgggcgtggtggcacatgcgtgtaatcccagctactcaggaggatgaggcaggagaattgcttgaacccaggaggcagaggttgcagtgagccgagatcccgccactgcactctagcctgggtgacagagcaagactctgtctcggaaaataaaataaaataaaataaaaataaaaataaaaaaagaaaaattaaaaacctgccttgacgtgtacacggggttgacagctcagaaggcgctgtctcctcctcacttatgccgttggagccttacaaccatcacagagaggagaggaggtggaatgagcaacccatttttcaggtgaggcagcacagacctgggttcgaatcatggctctgtcacttcctaacccatgactcagagtgacttccttagcgtctgaccggcctccatgtcctcggctataaaaccaggataacattagtgctcaccttacttgtgaatgtcaaggggaatacatgccgtgtgtggttttgtgctagaaccagtattcagtcaggtctcagtaaatacccagggttggggaggggaggtgaggagggagcagttcccgatagccagagtcgaggtgaattcagatgctgttggtacccaccctctcccctctgccccgaagttcaccagtggctatagtagaaagtttccagcatgctgacagcgtcctccctctagcccctcttgtacttatcatgtttgttatttcctgtattttatgatgctttcacatcctagggccttgctaatcctggagagactgctcctcccgaggctggctaattcctagagctagcaaacaacatgcctgcaaacctgcctttcatgtacaaacaaatacagagcctatgtacccaagcatctccttcctctaaactctcacaccccaagccagttgttcccctgcccgaaatcaatccagggccatttcccagacaactagaggccacccctacagcccagagcctgccagaattctcaaactagccatcccaaactcgctgaaacgcacctagcctcccttgcccattccttcccgcaggaaccacagtgaaggctttggactaggctctgccctcactcctgccaccacctgacccaccctggtgcctccccatggggtgtggggtccctcctctagaaactgtgagtaatcaattccttctgggcagttgtctccttgtctgccatcttgccatacccgaagaaaaggaagtcctgggcacacttgagaacacctgcagctcacttcttttctgcctgacacctttccccagcacccaagaaatttgctctgagacacatgcagcccagaagtgcaagggaattgtctccaccaagggaggtgggtgcagaggtctggatgccccatttcctgccaagggctttctttgacaacaagaagtagaggtgggcagtggtgggagctggggtaaatgcccagctccctgtccttccagcatgttccacacaatgccagggagggcccaggccgagtgctgtgcttgagatggcaaaaccccaactctacggaaaacacacacacaaacttggatcaggccccatctgctcatggagaactccctatccaactccagcagctatcaacactcccagaaaatccagtttcctacccaagtggaagagtgaggaggtactaactctggaagctgaaaaaatggcttacatttgtccccatttattctccttaagaaatatatttataggccgggtgaggtagctcacccgtaatcccagcactttgggaggcctaggtgggaggattgattgagactagcctggaagacatggcgaaaccccatctctacagaaaacacacacacacacacacacacacacacacacacactagcctggtgtggtgatgcatgcctgtggtctcagctactcaggaggctgaggtaggaggatggcttgagcctaggaggtcgaagctgccgtgaacccagattgtgccactgcacctcagcctgggggaaagtgtgagaccttgtctcaaaaaaaaaaaaaaaaagaaatgcatttataataccattttactttttgtgtgtaatagtcctttatctaaatttgtctgattagagggagccacagacgacctaggagctgccagcaggcaggggtgcctgggaaggaggcctaaagcacaagaggacaaagggggtgttaagatcctgtcgcctcctggccccaaagcttccactgtcctctcgagtgccaagtgctggcatcaggccatccccagtccgagacagcctcctctctactccccacaacccagccaggcatgtcctcttgaagctcaatgcagacccagccagacgcggcttcctttccatcttcatacttttgctgccacttcctgaaacacctcctccccgtctccgatctggaaatcaaagagcctggggaatacaggctcagagcccaggcctcagcctgctccgaacctcaggatgccagcccaaaccagcccacctggtggggctgctgtcagcgccacctggatccagaagctcctggctgcatggaggaggccagagggccttggctgcctggagccaggagccacgggccgtaagccgggtgctgagctgatctgcacgcctctcaggctggggaaagggctcgtctggggtcagtgcaatccatatctcatctgcagctctcctagcggaagtgatggctattggaacatggtaatgggtgttgtctagtggaagagactaatcttcccggctgtggagggctctgcaggtggcccacgcgccagcaggctccgctcagccgctcactgctgtcactgccaccgctgatggggctatcgaggcagttgtttttcttttttttttaagcccacatccggtgacctatcaaattgaggcaagtttaaagccagagcagcctggtgtcacgctggtgtccatcccagtcttcctggcaccttcctggcacaaagcctcagagctgatcccgacccagtccttccgagcacaggtggggacaccaaggccagtgacgcccaagcccatggactcaactggaagagggccaggatgaaacgctagtctccagactccccagccagcatcacacagaacactgactatgactaacccacggccaggggcctaacttggcccttaggtatgccagggtttctattggtcggctcaatgcttcttgaaaaaaccagaattcaaatgccatcgatacactggctacagtcctcaccactccctaatgtctcacactcagccagctttactcattttgtcatctatctgatcttggatcagtaaaactgaggtctccacataagggggtgaggagaaagggaaccagcctcctcccctggagagtgggactccagatctggtctccttgtcccagaggccacggatcctggcagactgtgtgccctgctgcccactgctgtgaatgatgctcattacaaatttcagtaaatattaactgagcagctgctgtatgccaggccccagggactcatcagcccagctagcacaaagtcctttattttttatttcattttgagacaggttgtcaatctgtcactcaggctggagcacgtggcacaatcatagatcactgcagcttcgaactcccagactcaaatgatcctcctgcctcagcctcccaagtagccgggactacaggtgtacaccaccatgcccagctagaagccttttatttcaacggcttcatgtgctgctcctttacggagccctcccagcagttagcagtaagcactgaccctctcgtggtggaattccaaacacctgttaccccaagcagcttggtgtcatgggaagtgactgaactgactctgccatgagcttgcagagggctcctcaggccagaaccttgggcagggctcggaacatttctggacccagctttctccaaatgtaaaacaaaaggcttgaactcaatgacccctgaagaaggtaggttccctttcttttcaaatgtcctttgtagaatttgtgcaattttgaaagcccctccggtattctcctctgtgaggcttccaggggcgggaggggtgggaccctgctggtaagaccccatgggagggctgggagcggggcaggccatagaatttgagacaagtgggccgggcacggtggctcacccctgtaatcccagcactttgggaggccgaggcgggtggatcacgaggtcaggagatcgagaccatcctggctaacatggtgaaaccccgtctctactaaaaatacaaaaaattagccggacatggtggcgggcgcctgtagtctcagctactcgggaggctgaggcaggagaatggcgtgaacccgggaggtggagctggcagtgagccgagatggcgccaccgcactctagcctgggtgacagagcaagactctgtctcaaaaaaaaaaaaaaaaaaaaaaaggaatttgagacaagtagttccagctcacatctcagagttctagatgggcttgggcatgccgatacaaaaaggactctgggctgttttcctttgtgacttttgaaatggcggagcggtgtgcgctagaagtgggtgtttcttgataaatgggcagattcttaaatctggaacctctctgagtctggggcctaggaatccacctgtttcgcaagctgcctgagtgattctgatgctcactgaaatttgaagaacacaggcctggagagatggaggccaatggcatgcacagaagctgatgcctgatgaccaggctccagggtggttcctaggatctgggtgggttgagtatctgcgtgtttagccaggaccaactgtgcagatgctgcccactcgggcctcccccacccataagcccacattcaccagcctccccagaaaagacgatcacagttgccacagcctctgagggctccctgcagagccacaggtattctggggagccaagtggtcacaagccccagttggaactcaggcagaaccggagcgtgccgattactccatctctgagtctcagtttcctcatctgtaaaatgggcccagtaatagtacttatcttacagggttgtcttgaggaatatattatgcacataaagatcttaaaacagggcagacaccaggtaactgttccacaaatgagaacttttgtcctattgctactgattatcaccattctgccctgaccccattgtattagtctgttttcacactgttataaagaagtacctgagaccgggtaatttataaagaaaagagatttaattgactcacagttctgcatggctagggaggcctcaggaaacttacaatcacggcagaaggcaaagaggaagaaaggcgcgtcttacgtggtggcaggagtgagggagagaagggggacttcccacacattttcaaaccattaaatctcgtgagaactcactatcacatgaacagcatgggggaaaccactcccctatccaatcacctcccactatgtccacaaatcgagatgagatttgggtagggacacagagtcaaaccaaatctcccatgcactggcttcctcctccagcccctcccccacaccctgaccctggagtggtggcaggcaccagttgttactaatcatgacacaacccccacccccacagggcttgcaaggacacagccagccactcagttaagatggtaatgaagcagctgtgaaacaagaggcctttccatctgggatcccagctgacctgactcctgcctaaggttggggaatctgctgtgtggatgctgcccccccgcccagctgtttatccctggtgtgatgatggctcaggctcactgcagcctcagcctcctgggctcaagccatcctcccacctcagcctccccagtagctgggatgacctgtgtgcaccaccacgcatgactggtttgttttatttttggtagagatgaagttttaccatgttgcccaggctggtctcaaactctctgagctcaagtgatcctcccgcctcagcctcccaaagggctgggattagaggcgtgagccactgtgcccagctgcaatcacttatttatgtctctgttaatctgctcgcaggcccagctcccgcctcattcgcctccatggaggcagcccccgcccttgggcgccaatggtaggatggagtaggggggctgtgcgtggcgagatggaagtaggagtacaatgcccccttccccttcctctggatgggagtggcggagggcaacactctacagctgtgggtgagatgatgcggccctagaaaagctctgggacgaagtaccaagggctacaatcctggccgctcctcccagtcactatgtgacttgggaaggggcttgaccccaccttggagggacaaggacatctgattcattcagaaattgttgattacacttgccctttgtgttcagcactattcgaggtgctggggatatggagatgaaggaaacaaaccagctcctgggtgtgctgggggagggagcatctggagaggggagtcaggggtcctcccaggagggagagcgagagcagccatgtgaaaagtgcagggaagggcattccaggcagaaggaacagcatgtgcaaaggccagagggtcaaggaaccaaaaggagttgagagttggctcaggagagagagaagaataaggggctagagaggcgggcagggcatgggcatgcggttgattctaagagcactgggaagccgtgggtgcctgaagtgatcgagaaaagccaggtcaaatggcagccagggaactccaggacccaggagtcctgctgtcagagatcccaggcccctcagccccaccctccctaacctcgtaggcctggggctcagtgaggttcatggccccgctcctgggagcagctgaccctgtgcaccctggtgagcccctgaggggaagctgctcaccagggattggggtccccactccttccgagccctctcaacaaggcggctttgtctggcagccccaaggacccccacgctcctccccaggccccctactctgagctctgaaaggaggctttatctgcatcccaggccagactgctgggaagtgagtggccgggactggcacatggggccaggcagcagccgcagccctgactcctggggctgcagacacagagagagccaaggacaaaagggtgccctggggaatcagcccggccccagaggaagacaagaggactacacaggctcccctgcgccccatcccctcccccgcaatctggtcacttgatcgcagtggtcagtgacacggccctttgtgcagcccctgcctcaggggagaaggaggcaggtaaggcagcgctgcttgtaatcggacctcccggggcctgcttcccgttccctttctctggtcctgggaagctttgggagggtgggaacggtttgtcaaggacggtacctttccaaatgaaaaggagcttcaggaaagatcgatgccctaagccatcactgggccaactggagagaatgagaagcagaaagaagaaaggccagaaaggctgatatttctgagccacctcttcctgggtgcgtggaagatggtacctctcagccgggtttctgccaccctgcttagccctggttaatgtggataatggcaacaatgatgtattccaagtgcctctatggagattacctctaccatccacaatgaccctctgtggcaaggagcagcagccccattttacagggacaggtacagaggcccagagagactaaaccacctgcccaaagccacacgagaggcccagccaggattcaaacccaggaacgtctgatgccagagcccaggccttgaaccttgtgcctcccagcttggctgggtccacccatctgccaatgctgtgtccagaagccccacgtcagctctgtcctggctgtggacatcctggatgtaagacgtgggaggaaccccagccatcacctctacaagaaaacttaaaaattaggctaggtgcagtggctcacgcctgtaatcgcagcactttgagaggcaggcagatcacctgaggttaggagtccaaaaccagaccggccaacgtggcaaaaccccgtctctacgaaaagtaaaaaacaaacaaacaaacaaacaaacaaaaaacttagccagacatggtggcgtgcaactgtagtcccagctacttaggaggctgaggcaggaggatcactagaaacagggaggcagaggttgcagtgagctgagattgttccattgcactctagcctgggcaacagagcaagactccatctaaaaaaaaaaaaaaattaaaaaatgagccaggcgtggtggcacacacctgcagtaccaggtactcaggaggcttaggtgggaggatcgcttgagcacagaaggttgaggctgcagtgagctgtgttctcaccactgtactccagcctgggtgacagagcgagcgtctctcaaaaaataaaaaggtagtttactaacatgactgaactgtacactgaaagatggttaaggtaaattttatgttatgcatattttgccacaatttaaatttttaaatgttcaaacataaagaaagaagtgagtctagccagtatccaagaggcactaaaccaagtgacaccagcccaagtctctctgatgcagtgagaatttgtgggatggaatggaagagaacgaaaaggaggatacgtttaggccgggcgcagtggctcatacctgtaatcccagtaatttgggaagccgaggtgggtggatcacctgaggtcaggcgttcgagaccagcctggccaacatggtgaaaccccttctctactaaaaatataaaatattagccgggcatggtggtgggtgtagtcccagcaactcaggaggctgaggcaggagaattgcttgaacccaggaggcggaggttgcagtgagctgagatcgtgccattgcactccagcctgggcaagaagagtgaaaccctgtctcaaaaaaaaaaaaagagaaagaggatacatttatcacagcgggtgcaatgttcagcccaaatcatcttttgggccaccagtcatgcctgttgtatttgggaaatgccaatcattgcacaaatggggagactgaggcccatagagaagggcacaccctgatgaagggccagtcatagtcacgaccaggctggaatctgcagccaccagcctctggatgtgcctcaccccaggggtcacaagaggcccagcaaggagttaatgccactgggaggacagtgaggcgccccctggatcttgccccccaactccaggaaagagggtaaaggtgaaggaagaaatggctggttgcctccacactgtgtgccctcagcccatctgggttgggcaccagggactgggcaggtgtacagactttacttcctgcagaccccaggagggctgtggcatcgggagggagactgaggctgcctggccgaggggaagtgggatggtgacagtggccgcgttgacggctcggccccaggcgctgcgcctgagctcgtctcagccaaacgtctaacactcatagagacacaggctgggaaaccagagctcagagagaagtcacttgcaagtcaggggcagagatgggattcgaacccagatctgtgactccgggccctgcgggcaagtgcctaggaagatggtgggggcccgtgaggaatcatcgcaaccaaaccagcttcccttctggccccgcactgaagccatgtgagctttctggaacacaattgcatgttattcctccctctcttgcctgagctgaaagcttcctggggctctttaaagtgtgacgctggtccctggccacctctggagccctgtccccacctgtctggactccctttggattttgtccctcagctagactgacccatttgcagtccctcaaaagctctgccacctgcaaaccgggccacctgggcccaggctgagcccagtcttccccaccatcaaagtctgcacccgcaaggacagaacatgcagcgcgtacggtgcacactgtaaagtgcggtgcccccgctacatgacgacaagggagagcagatcaaacccagcctggctgcagctggcgaacgctaagaatccagccgctcagaccgtggtctctcacttccctggcatgcccttcactgcctcctcccgccccgtcctcactgtccccactgtccccaggggaggcaggtccaccctcagatttaccagggcatgttaagacacagtttgaagccatctccgaggtcatgaggtcatggcagtttcccatcgatctatttgtccctcccttgcctgacgccctttgcccccatgggcccccagagccatatcaaacttcagcagtttctcccaaggtccaaggagccaaaacacagggcagggccttaaaacacagccagcgggcgatttaccagctgggctgcccaacccctgacctccggaggagatgtaatgcatctccctggtttagccggatcaatggtgctgtgaaaaacagccccatgtgggccagttgggacaggagggagacacccctgccgccagaaatcccacccggacagccgcggagtcagcctccgtgcacacgcacggccccaggacctcgctgggctcgccgactgtctcaggcaggagctgggattgctgagaccagcccctagaattcggatggggaaactgaggctggggggcttctcaaggtcacagagtaagttcaaggaagcctccagtttccccagggggaactctccctgctcagcttcggccttctcctgtgggcgaaggtggcagtggccagccagtctggtggggcagtcgtggtattgggggtatcataggtccctggaaggccaagcttggctgtcccacagcctctgggcaggaccagtggacccagtgtgcctccaaggtgggacttcctgcctttgactctgtgtggggcagaaactccaccttcaacagagtgtcctgcctgagtcacaacatcccaacgagggcagaggccagaggcagcaagccaccccatgctgggacccccttgctccccagaaagcacagtagcccatatttagggaggaaggttaacaagagcaggagggctctgcttccaaattctcctcggtcctcgtgtgaccctctacccctagcctgagccagcaggaagagcaggcggctctacagcctcccgccttcaagcaggggccatagacccacaggggcccctgggagctcactagaaaggcagaatctgggcccctttgctccagacctactgaccacagtctgcattttaacagctgatacatgcgcgcgccaaggctgagagtgctggtgtttagaacctcccggagtgaaatgagaaggggcgagtgtgcatgtgtgtgttaagatctttaccctaaagaaagggcctgagatgaggagggaaggtgggaagggagttaggtaaaaaggaaggtagaatggaagggaggaaaaaaaagataccctccagatgtccaaaaagtatctgaagtaacttcattcacctcccattccttcactgcatatttattgagcatcagagacatgctaagcactgagctgagcgctggggtagagcagcgagcaaaatgggcgagacctcagccccatgcgccccaccaccccacagcttacggtctcaagctgtgctgtccggaacagtagccccaccacgtgtgagcgcgtgaactgtggccggtccccattgagatgcgctgtgagtgttaaatacacactggatttcaaagacagtgcaaactggccaggcgcagtggctcacaccagtaatcccaacactttgggaggccgaggcaggaggatttcctaagctcagaagtttcagaccagcctgagcaacatggcaaaactctgcctctacaaaaatacaaacatcagcccggcctgtactcccagctactcgggaggctgaggtgagaggatcacgtgagcccaggaggtcgaggctgcagtgagctatgatcacactgccactgcactccagcctgggtaacagagcaagaccctgtctcaaaaaacagtgcaagcaaaagaatgtaaaatatctcaattttaaaaatattcactacatgccgacatgatcatactgtgaatatattgcattaaacaaattcacgtatttcttttttttttaatgcagctactagaaaactttcaattatgaggcttacatttctgttgtacaacactgctctagaggatgagacagaaaacaaactaataagcaaacaaaaagttacaagcaaacaaaaatgtaagaagattacatgtgatgaaaagccctgggaaggaaaccagcaggatgagatgcaggactggagatgaggagcgaggtctcttcaaataaagacatatgagctggcacagtggctcacacctgtaatcccagcactttgggaggctgaggcggggggatcacttgagcccagaagtttgagactaacctgggcaaatggcgagaccccatctctacaaaaaatttaaaaattatccaggtgtggtggcatgcacctgtagtcccagttacttaggaggctgaagtggaaggatcactttagcctgggtgtaagttacatatagtcaactgcacaaatctgaactgcacctcaggagtgttccatgccgctcccagtcactatggctgtggtggtgcattagctacctattgcttcaaacaacacacgttgatcatctcacagtggctgtggctcgggagtctgggcacagttgaatgggtcttgtcttcagggtctcatcaggctgcagtcaacagacacacacacgcacatacgcacactccccacttctcatttcactccgggaggttctaaacaccagcactcccaaccttggcatgcacatggatcagctgttgaaatgcagtcaaggtgtcagccgggctgcatcttctttcagagctcaggtcgtcttccaaggtcttgcattggtcggcagaattcagttccttgcaccagtagaactgagctccctgttttctggctggctgtcagccagtggccccctggtgccacgtggccatctctaaggcagttcacaccatagaagcttgcttctgcaagtctctcttcagctttttttgtttgtttcattttctttgagatggagtctcgctctgtcacccaggctggagtgcagtggcgtgatctcagctcactgcaatcttagtctccagggctcaagggatcctcccacctcagcctcccaagtagctgggattacaggcatgcaccaccacgccagactaatttttgtattttggtagagatggggtttcgccatgttgtccaggctggtctcaaactcctggactcaagtgattcacccacctcagcctcccaaagtgctgggattacaggcgtgagccactgggcccagacttaaggttttacctaattaagtccagcctaaccctttcaatgaactcaaaatgaactgccttgagatctaaattacacctgcaaaactccttcagctttatcatctcagccaaaagcacatccctagtcccacccacagtcaaaaggaggggttacaaagagtgtacataccaaaggttaaaaatcagtgggagtcagccagggatggtggctcatgcctacagtcctagctacttgggaggctgaggcgggaggatctcttgagcccaggagttcaagaccagcctgggcaacatagcaagactccattcttttaaacaaaaattacaggggtcactttagggtctgtctgccacaaatggtaatgacaattctaacctcttcaaccccaattaaaaattaatcatttactaaaaacttacgaattcattaattaattgtgtcagactccttttatcttttttcttttttctttttttttttttgagatggagtctcgctctgtcacccaggctggagtgctgtggtgcgatctcagctcactgcaacctctgcctcccgggttcaagcgattcttctgcctcagcctcctgagtatctgggattacaggcacagccaccatgcccggctaatttttgtatttttggtaaagatggggttttaccatgttgaccaggctagtctcaaactcctgatctcaaatgacccgcccgcctaggcctcccaaagtgctgggatcacaggcatgagccgccgcgcccggcctgcatcatatttcattatgggaatgcaccacgatttatttcacaacttctgttgacagatatttgggttgctcccagtttctggctattgaaatagagctgctagcacgtgggattctggatcagattttagacaatccaaagacattaatgaaaaaactgatgaaatcaaagtctgtagtttaattagtaatattgcacccatgttaatttcttagttttgacaaatgggccatggttatagaagatgttaactgtagaagaaagtgaatgatgagtatacaggggctctcggcactatccttgcaacttttctataaagctaaaattattctgggcccaggcgtggtggctcacatctgtaatcccagcactttaggagccaaggttggaagatcacttgaggccaggagttcaaggccagcttggtcaacagagggagaccctgtctgtacagaacaaataataataaaaataattccaaaataaaaatttttataaaaataagtaaataaagctaatagcaaacatctgctacaggccacggaggagtagtgggtatacaactagcccttgatggaatctatgaggctactctgttcggtgcaagaccatagattcagactgtgcaagaccacaatccctgagagaagggaaacccatgaagtgagccccacaatcaccagatctctgcctggggccaatttcccagccacagaccagagagcagggatccaagctgcagtcatcctgctgagctgggaggcagagataaggacacggagctactgaggccgcagggtctgcagggctggaggaaaggatgatgccagggctgggtttctttttttttttcctttctttctttctttctttcttttttttttttttttttttgagacagagtttcgctcttgttgcccaggctggagtgcaatggcgcgatctcggctcaccgtaacctccacctccaggatacaagcaattctcctgcctcagcctcccgagtagctgggattacaggtatgtgccaccacattcagctaattttgtaatttttaataaagacggggcttctccatgctagtcaagctggtctcgaactcccaacctcaggtgatccacccacctcggcctcctaacgtgctaggattacagatgtgagccaccatacctggatcttttttttttttttttttttttttttttttgagacagagtcttgctctgtcacccaggctggaatgcagtggcaccatcccagctcactgcaacctccgcctcccaggttcaggcgattctcctgcctcagcctcccaagaagctgggactataggcatgtgccaaacctggctaatttttggatttttagtagagatagggttttgttatgctggccagtctggattcaaacgcctgagctcaggcaatccgcccaccttggcctaccaaagtggtaggattacaggcatgagccagcatgcccagcctcaggctgggtttctaagcaagtctttgactatggcctggggggcacacactcaggacaagacgacttgaggctttccagagagcagctgctgtgagtgcagtgtgggaccagatccttgaagaccccctgggggaaaagaggcgggatggcagaggaaagggtgggagcggatcacacaggtccctgagggctgagaggagggtttggcttttgctccaagcaaagtgaagacaccaaatggtttgggcagaggagtgccctgccctgccattgataaagggccccgctggctgctgagtgaagagcctgttagatctgtggtgggggctcgggtcagagccgagggtggaggtggctgtcagtgtcagagcggaagccactccaaaggtggagcccatcaactggacctgggggtgggaggaagacaggagccaggagggctccaaagttctggcctgttgatttccgagacacttggcttttccttttttctccttttgaaaaccagttaatagacgcttggctttttcttacagcaggtgtgcattaccattgcaatgagaaaaccccaaaaagacataccttttactggagggggagaaggcattctccatgttgaaagcattctccactcctttcccgaggggagccatgaaggagacacgcgtctttcccaggtgccccccattgcccagtggtctgccccgtctgctgcacaaggtttgtctctgtctcttgctccttcttcccgctatgtgtgtccctcctgtcctccagcccctgaacaggtgctgcagggatggacaatggggaagagccagcactggggctgggtgggggtggatgaggggtgcaagaagttcaatgaaagacttgcctttggttaaaacaaatttttttttttaaaagagcatctttctcccctatccgagcaaggatggcctttgggaccaccaatgcttgtgactacgacttgcagaacagagacctctcttggtctcactcctgcgcccagcctcttgtggcctcactggccctggctgtggtccctcctgcccctcaggggtcccttcccacctcagaaccttccttttttttttttagacggagtcttgctctgtcgcccaggctggaatgcagtggcgccatctcggcttacagcaacctccacttcccgggttcaagagattctcctgcctcaccctcctgagtacctgggattacaggcgtgtgccaccatacaccgctaatttttttttcatatttttagtagaaacagggtggccgggtgcggtggctcaagcctgtaatcccaatactttgggaggccgaggcaggcagatcacgaggtcaagagattgagaccatcctggccaacatggtgaaaccccgtctctactaaaaatacaaaaattaactgggcgtgaaggcgcgcgcctgtagtcccagctacttgggaagctcagggaggagaatcacttgaacccaggaggcagaggcttcagtgagccgagatcgcgccactgcactccagcctggcaacagagcgagactccactccgtctcaaaaaaaaaaaaaaaaagaaaaagaaacagagtttcatcatattgtccaaactggtctcaaactcctgacctcaagtgatctgctcactcggcctccaaaagtgctgggattacaggtgagagccattgcctggatgtcccagaaccttctccctgttctgttacccagactcctcctttccctctctctctgcccacctggggctcggcctccttcagggctcagtgttccggggcccctcatccccctcccccaacagtctccccacccatagggtctctgcctccaggagacctccagaccttccagccagcgtgaggcctgttacaggcttgtgtgacttcccctcagagcagtgtcaaggctgtaatgaatgatgatttctgggatttttcattcactgtctatcccccgtgctaacctgggagcttctcgttcacctcagtattctcagcccctagcagaagacctaacccataactgatgctcaaaagatacttattaaatcaaatgatatataactcagacagagatgagtacatctgaacaagtggcgcccaggagctagcacgcagaatgggctttgaaagtggatacaatttcactaagtgaagatggaagaatggaggtttccaggggggagagctcaccatgaacgaagaaagggaagcaggaaagtgtgtgtcaacttcagtgcccggaagtgcatgcacagcaaaaaacaaatatttttaacctttttacaaaaaatactgggagtctctctcaacctattctggtctgggggctgcccaattcatgaatcaccagaataagtaaataaatgtataaataaaatacttatggcagggtgtggtggctcacacctgtaatcccagcactttgagaggccgaggcagacagatcacttgaggtcaggagtttgagaccagcctagctaacatggggaaaccctatctctactaaaaatacaaaacttagctgggtggggtggcacatgtctgttatctcagctactcaggaggctgaggcaggagaatcacttgaacctgggaggtgaggccgcagtgagcccagatcatgccactgcattccagcctgggcaacagagtgagactctgtctcaaaaaaaaaaaaaaaaaaaaaaagacaaaaacttaccaaacgaatgactatttggaagggtggatggacggacaagcagatgggcaacaggttaaagcaaagctcctccttttaaggaaacagaaaccgagggctggagagaaagggggctcctgaagatgactgcgttgcattgaggcaaaaggaaagccgttgtaccttcagaccatctctcgccatccaccctgcgtgaccattgcctacgccagtcttccctcctcccaggacccctgccccccacccccagcatcctctccagtgccccctcaaaggtagctactttcctgctcattactttttaccaaacctggagccgaagccctgagtgagcagctggaggcggggatgggccctttgtccaagcctcagcccgagggtgggggtggggaatgaagctggggggctccgtcctccccgctctctctgccatctccctcgctgacttttgtccttggatcgcctgcgtgatcagaagaggtttcattctctggcaactgtgcagccattagcgagaggcagacgcattaccctctcaccgcacaatcgttggctacttcagttattctatttcacctgaagactttatttgcagccgagcctcccctccggagcagggcaggccccatctgtcggacagtttgctccagcgtctccggccattatgcctccacttggaggacgggatggatggcatgcgtgcaagggagcaggggagagagcgagctggggagagagcgtgcgtgtctgcctgcctgcactccctcccacttgtctctttatcattctcccagggccgaacagaacttgctttgaagagtgatgtcagacgtgtacaaaacagagcgataaaacctaatgcactcgcgcccctttgtctgcctgattctcctcccgaacatttcccactcagaaagccacttaaaacacatcagcagtaactccacaaaacagccacttgttggctaattgagctaagcagctgccagcagggctaggggaggggtggggaaggaagctggaggcccctccactcccccagccagagcctggctcctggggagggtgcccggcccagccattgcctccctcccgtacctctgcaccgcaaggctctgcaaggagagaagacgcagctctgctcactgggtggagggcggggaggcaaggaactcgcgcctggggggccgggttggggagccaggtgggcaggattctctgccagctccctgggagtcactggccatctctgggcctcagtttccccacccaccccataagcgggttggactgtggcttctggggtctcttccagttcccaaaggctgcctgttgttacgcactgggagcttccgacagacctgggttcaaatcccagctctgccttttgacctgtagcctcaggctctctgagtgtgtttcctcatcaggaaaacgagataccagcagcgcctgtcatgattagcacaaggtgaggtggtgcctggttagtccttggagccagtcagcacaagacagggttgctggggctcataacagggcagcccctggcccagacttggaaactagggtgagctaagctgagatcagaaagataagaacctcaccagactagggtgtgggcacaggcaggggccagtgaacagcatatgtaagagtcctgaggcagagctgaattggaggaccagaaagaaggccagcgtgagtggagtcccaagggaggagacagagaagtggccagggccaggtgagaaggacccagtagactgtggtaaggagcttggctttatcctgagggcatagggagccatggagggaggggagcagccaggtaccttttttaaagacccttcctggttttagatggagaagaagctggtggtcagggttcaagagcagaaaagacactcttcctaccctgttccaacagcccagcctggatggcaaaagcgacagaccctccctcagagggacaaggatgagacggccgaaccagtgctcctgcccgggctccacaggcccctttcctcgctggccccactggagaggcaggggttaagctccatggcctgtcccctctgtcacacatgtaccctgccatctctgggctcaactgtcgctgcgctgtatcgggactccatcagagaggctcaggcagcagcttgcagtgttcaggccggcggtctcgagggtggcgagttcttgcactcctacaacagcgcttgaggacggctctgtccgctggcctatgctgcagcctcctcctgcccctgcggcagaggagggagagccgtgggcacagctagcactagcacgtgtgggttcagaggtctgagcggccacttcccgcttccagacctcggatgcgacgctcatctgcacggtgtgggcagagataacatcctccccagaacagcatggaaatgtttcagcagggtgctcggcttagataagtgctcggcaaaccagagttgccatcatgattcccccacggccctcaatcctctcctccctgcaaagcgtgcatccttttttaccccatcttccacccctcccaatttcccttttggcctcatcttggaggctgtaagtcagggtgaatcattcatcaaaatatctcactcttcctcttccagggttcctgatataattacctccctcttcggttttgctcctgatccctcttctgtttttttctgtgtgaactttattttaaccatcctttgtgtctgtgaatgttttttttttttttaaatcttgccaatgaaaataacttaattgctttttctggtttttaaagtaacacacgctcattaccaaaaacatccagacaacgcagaaaggtagaacgaggggaaaaacagtgaggttgtttttaagcagcctgcagtagtttgtagcagggttgggataaggaggccccctctttataaaactggggtgctccccacctgcccccagccctcagccaccaacatcttgcccactgcctaaatgccagctcaggttcttgctcccccaataggcttcctagactcccacagcccagggcgatctttctgtccactgacttcaattcttttcatttctttttcctttctttctttcctttttgtacaatggcttgcaatcatggctcactgcagcctcgacctcacgggctcaagcaatcttgatcctcccaccttagcctcctgagtagctagaacgaaaggtgtgtgccaccatgcctggctaatttttgtatttttttgtggagacagggttttgccatgttacttgggctggtctcaaactcctgagctcaagcgatccacctgcctcggcctctcaaagtgctgacaggcatgaaccaccatgcccagcaatccttttcatttcaacaaacatttattgagcctctactttgagccaagacacaggatctggccatctggattcatccccttctgcctgcgtttcattggtttttcgttatttttctgcctggtgtgtagactcctgctcccccgcctggactgtaaggtccccacgggcagacctacagctctgtttttgtatccccatccctagcacatattgttcctgagagggacctcgcagctgcctacagggagggcaggtgctgtggattgcatgtgctggacaccacgccaagcctctggcaccaatgatcttgtgtgatcctcaccttgacgacgggaggtgggtgttgttattagcttgacttttcaggtacagaaactgagtttatacacaattgcccaaggaaccacgatgggtgagctgagagtcaagaattgaacctgagtctctgagaccgaggcttgagttctgagctgctacaggggattgcttccttgtacagctcagtagtggcacagggcgggggacaaatgctctcagcaaggaatgcctgggacaggaaggacagtgtcatcgtcctgggctgatgcttgaccatgttactttctttttttttttttttttttttgagacagagtctctctctgtcacccaggctggagtgcagtgacacggtctcggctcactgcaatctctgcctcctgagttcaagcgattctcctgcctcagcctcccaagtagctgggattacaggtgcccatcgctacgcccagctaatttttgtatttttagtagagatggagtttcaccatcatggccaggctggtctcaaactcctgacctcaggtgatccacccgcttcagcctcccaaagtgctgggattacaggcatgagtcaccgtgcccggcctctgccaagttttttgaagaacaaatgaatcataaaatgctggtcatgtcacttctggcttaagacttctcccagcttgcaggagcagtttccaatgcatttgctgcaaacccttcaaatgaaatcttacactgaaaatctaaatgaacaaccaatgaaagtgcagcttccctgagacctggggtggggctgggtgcagaacctgcatcatctcgtccgttccctccctctggttcaccttcctccaggtgccagtggggctctgaggattccagggagctcagtttgaaccactggcctaaagctcaggtccaaatgcttggttagagcgtataaggcacaccatggtgccgccagctggccagccctctcccctacctctctgccctgctctgtgtgtacctgcaccttccactcagaatggccagtggttctcccaccacaactgattcacagctttggcttgatcacaggctgttgcctcctcttcggtgctttccacttactttccactgggttaactcttatgcagcctttgaaacttggtcaagttcaagaccagcctggccaacatggtgaaaccccatctccactaaaagtacaaaaattagccaggcgtgtgggcgggtacctgtaatcccggctgctggggagactgaggcgggagaatcgcttgaagctgggaggcggaggttgcagtgagccaagattgcaccactgcactgcagcctgggtgacagagtgagactccatcagaaagagagagagagaaagaaagaggaagagagaggaagaaggaagggagggagggagggagggagggagggagggaaagagagagaaaaaaagaaagagagagagaagggaggaagggagggagggaggaaggaaggagcgcccatcttcatttgtcatgaaaaacgtgactactgctcacttctgcagctagggtgaaacgagggggccaggagagcaggttctacaatttttctttaatctgctcctttagcaagtaagtgttgagctcctgcagtgtgcttggagtataaatttgaaaaaggcagaagcaggcaccagcctgggggaactcacaggctagaggagaaacaggtcatgagtccccttgtgactggcaagccccgcatgggggagcatgaaggtggggctgcttcacagcctcagggagctcattcctggggaggggaagtctagccaagacctgaaggaggaggattagccatgcaaagaggaagggaagggtgttctgggcacaaggaacagcacatgccaaggcttggaggtaagagagagcagatcggtctggggacgggaaggaccagtgtggctggaaggagacacccagccagggtgatggggctcaaggcacacaggaggcagcagatgaaggtggggtcagacttgcagaacccttgggctgagcctaggagtttggaggccactgaggaggattatgcaaagaaatgacccaatctgaaatgcacttagaaaagtttctctgggccgggcgcgatggttcacgcctgtaatcccagcactttgggaggccaaggcgggtgggtcatgaggtcaggagttcaagaccagcctggccaagatggtgaaccccgtctctactaaaaatacaaaaattagccaggcgtggtggcaggtgcctgtaatcccagctactcaggaggctgaagcaggagaattgcttgaacccgggaggcagaggttgcagtgagccaagatcacaccactgcactccagcctgggtgacagagcgagactccgtctcaaaagaaaagaaaaagaaaaaaatgaaaaatctttctggagaagcattaccattatagattagcagttgaggccaggtgtgttggctcatgtgtgtaatcccagcaccttgggagtctgaggtgagaggattgcttgagcccaggagttcgagaccagcctaggcaataaagtgaaactccatctcaattaaaaaaaaaaaaaaaaaaaaagatcagaagttgaaagttcaggttctggcatcccaagggcttgagttcaagtcctggttctgccagtaagtgaatgatcttggggaaattgatcaagtcttctgagcctcagtttctccagctgtaagatggggacaataatagtctctactgccaagagccgtgggaggagtcagtgagacattgcaggaagtggatccctcagaatggcagctgtcaggggcaggctttccatctgagtcattcactgctgtatctccatacctggaaaatgatagaaactccataaaatatgtacccagtgaatgcagaaatggttgttgagtgcatgatggattcgaggggcaaacagggatccctcttgactctggaaggcaagaggacaataaatatagctaattcaataatcatgcaggctcaagacacaaggcgttcagcaatgtacatacattagtccccctcaaacccaatatctccctcatttacaagtgagggcactgaggctcggaggagctggacgcattggccaaaatcacccagcaagagagcactgagcttggaatttgtacccagccctttgcctcagaagcctttgaagtaaaccacaatgccaggggccccaccaatgccatgcaccgcactggttttcttgctctgttggcagctgcctgtagctaaggcgcctgcaggtgcaacataggtgggggctggtgggcatagaatttagtggtccccagaaagggcctggtcccagggcttttgcatccatcaccagctatttattgagcacctatgatgtgtgccctttatagctacaaacttgtgaggtggggtgggggcttgcaggctagtggaggtgcctgccaccaaattgagaattactggggggtggaggcacacggacagggatagacaggctgatggccactggcagccatggtgattaaaacacaactggagtcccagctactcaggaagctgagacatgaggattccttgagcccaggagttcaagcctgcagtgagccatgattgggtcacttcactccaggctgggcaacatagcaagaccccatctcaaaaaaatagagtaaactcaataaacattggatgcttcctgtgtccatttccctcacctgggtcctgctgcacctgcctcaccatggcctccaggatcctgcagctgggctctgattggctgttccctgtccccatgcaggtgctatgaaagcctgacctgatgggtggggaaggctgcttgaggaggtgacggttcagtgatgctcagtgagggttaagtgggtggagcgagcgagagagagagagagagagagagagagagagagcagggcaggggaggacctacagctgcaaggcccaaggcaggagggagctgtgagttgggagagagaattcgtgatgaagctggagaggaggtggggctggtccacagggccctgtgggccatggggagagatttgggtttgatccgaggccaatgaggggttgtatcccaaggtcgatgagtcatggaggttctaagcaagggaggggtgtggcctggtgggaggggcccaaggggggcagggaggtagtggatggcactacccagggcagaggtggatgaggatggcacagaggccaggacggtgggatggagagtggtgcataagaggtaactcggactggcaggagccccctcctctgcatgtccccagcatcgaggcccaggacctcatgctcagacaccattcctcccagtcctagtgctcccagagaccattctggagcctgtggcaggttgctaggctgggacccctcatctggcagagcgggcaagagtgagagctgcagcctccagccctggctccccagagtgccaattctgaaaatgacaaacggagagccaataagaaggttggaaaatgggtacctccgtgcctccctgtgtctattgtagggtttggaaatagctgagatgagacgagagctgctaggaggggtgcccgctgggcagaggagaggcccaaagctgctgctgctgctgctgctgctgcaggaagtaagaggagagactggaggggagcggaggggaggaaaggaacagcagaagacagaaaggacaaatgtcaaaacggacgcacaaaaaagaccagttgtggtgtgtggcctaggattgtgggaggggtgtgtgtgtgtgtgtgtgtgtgtgtgtgtgtgtgtgtgtgtgtgtgatgcgggctttgaggagcaattcaaaagcccctggcccctgagcccatctgaacaccccccttctctcttcaccccaccaaccaccaaaaaaaaagagagagagagagcgagagagaaagaaggaaaacaaaatatctacagttgtcgagacaagaggagaaaaatagaggcaaacatccgtaattttctctgtggggctttgcggtaattgagccatttggataaaaataaaggcagcaggccccttaggtaagaagagcttttgcaatctaagaagcttgaattatgcgtcttgtgtcacttgaaatcccccattctcccccttccttgggtgacccaaaccactttcccttttcttattatttttttaagtaccctgtcaaaatgtcgactgtagagtagagaatttcagctgtcacaactaatttcaatttttccacgtgctttcccccttggggagggggcctggcagagccccctttccctccctcttgcatctgctcactctttttatttctcattattgttattattttaaaaccagatttacatcatcagtgtgtttggggagtgtttaaggactgtggtttgctcctgaggaaggctgggcctggcgctgttggtttctggctcccaccccgcctgcaccccctcctgcacgctcccacctccacccgcctgagcccctgggactcccacctctctcttcctggtcccaagctgccagccgccatcgaccacccactggggaaaatccagacttcaaaagagtcttgaggttctaggagagccgtgggaaccatgctcatttccctaccaaagggaagttccggggcaggcgagatccagaggagcttttccatcttttaaaaaattgtgtaatttgtttgtgtagagacaaggtctcactctattgcccaggcgggtcctgaactcctggactcaaataatcctcccgcctcggcctcccaaagtgctgggattacaggcgtgagccaccgcgcccagcctcagctattctaccttttgcctcatctttcttgcctcctcagtgcattcattccatgggcttcagtccagggccatctcctatgagctggccctgccaagctgctgggcacaccgaggtgagtaagacacaatccttgcccctgaggagatgacaacctagtgggctctaggagacaaaaaggcaggcggacggtgcagagtatctgatgatgtgctggtcagcactgtgcaaggacaggggggcacaggggagggacgggcccttctagcccagctactgagaggtcttctatggtttttattgttttttgttttttggagacggagtttcactcttgttgcccaggctggagtgcaatggcgcgatctcagctcactgcaacatccgcctcctgagttcaagcgattaactttcctcagcctccagagtagctgggattgcaggcacccgccaccatgcccagctgatttttgtattttttgtagagaaggggtttcaccatgttggccaggctggtctcgaactcctgacctcaggtgatccacccaccttggtctcccaaagtgctgggattacaagcgtgagccaccacacccagcctctgccataatttgaatgggtctcctccaagattcaggtgttgccaatgtggcagtatcaggaagtggggccattaagaggtgacgaggccacgagggctcctcccttgtgaagggaggtgcccttctgtaaaggggcttgacagaggaggatcacgcccttttgccctcctgccttctaccgtgtgaggatgcagcaagaaggccctcaccaagccaggcgtggtagctcacacctatagttccagcactttgggaggccgaggcaggaggatcacttgagcccaggaggtggaggccgcagtgagctgtgactgcaccgtggcactccagcctgggtaacagagagagaccttatctcaaaaaaagaaaaaaaatcttaaaaattagctgagcataaaggcagccaactaaatgcttgtagtcccagctactcagcaggctgaggcaggaagaacgcttgcgcccaggagtttgagatcagccggtccacattctacacaggtctctcgtgtagagactctatctctacacaaaacaaatattaaaaaaaaaaaaaaaagaaggccttcaccagatgccagcaccagaacttggacttctcagcctccagaactatggaaagtacatttctatgttttataaattacccagtctgaggtattttgttagagctgcagaagcagatgaagataaagtcttcgccgaggagtggtgccccagcttttcacaagcaaatggatgctgtctctacttaaaaaatacaaaaattagccgggcatggtagcacacacctgtaatcccagctacttgggaggctgaggctggagaatcgcttgaacccaggcagcagaggttgcagtgagccaagatcgcgccactgccctccagcctgtgcaacagagtgagatcctgtctccaataaaaagggggggtgggtggatttggacacagacacacacacggaggcagaaaactgtgtggagatgaaggcagagatcaggatgatgccttcacaagtcaaggaatgccaaagatggccagcaaaccaccagaagcttggggcttggggagaggcagggaacagactctccctcactgccctcagaagaaaccaactccgccaacaccttgatctcagatcctgtagatctcagaactgcgagacaagaaagctctgctgtttaagcccccagcaggtgtactttatgacagcagccctagcaaacgaacacacgtggagacaccaaacagcatgtctgagaattgctgtaattgagcaaggcgggtgcatggagtttgaaagtggcagcagttggggtggagtatgtagaatcggggacattacctgcagggcggtggagagtgggggaggacatccatagagggatttctttttttcttttctttttttttgagacagagtctggctctgttgcctagccaggctggagtgctgtggcgcaatcggctcactgcaacctccacctcccaggttcaaacgattctcctgcctcagcctcccgagtagctgggattacaggcacctgccaccacacccgggtaatttattgtatttttagtagagacagggttttgccatgttggccaggctggtctcaaactcctgacctcatgatcggtccccctcagcctctcaaagtgctgggattacaggcatgagccatcgcgcccggcccatgcagggatttcaagcaggaaagagatgggatgagatgcgctttgtaaaaggcacaccctggttacagagaaagcagcagaagggctgagacacctttctcctcccattcctggctccccttcccactctctctcccactccttctagcactctctggggatgggcctggctttactcacctgtgggttttggggcccaggacagggcctgctcctcatggacctccttgaccagtttgttgagtgacaaaacgggcccatcagcacctggtttctcagctctttctccttggttaacggccctcatggagcacgctggtgttcagaaaacgggatcaaggactggaggaggagctgcgggcaggtggcaggagccagaggtaccagcccctccccgctgagaagccactggattttttttttgtttgcttgttttatttggtttgtttgatttgagacagagtctcactctgtcacccaggctagagtgcagtggcgcaatcttggctcactgaaacctctgcctcccgggttccagcaattctcctgcctcaggctcctgagtagctgggattacaggcgtgcaccaccaaacccagctaatttttgtatttttagtagaggcggtgtttcaccatattggccaggttggtctcgaactcctgacctcaggcctgcttcagcctcccaaagtgctgggattacaggtgtgagccaccacgctcggccagcaagtgctgtttaaatgaggaggtgagcgacaacacgtccacactgggacagaggcagaaggagaagcagtcaccttggggctggcatcaccaaacgagggctcccatggacaaggtagagaactgggcccctgcttctcagtgtacctcctccttggtccaagtgggttcccagtgagatcagcttggctgtctcctattgtagcaggatgagccgtggacaaaatccctcagacaccgggttaaagaaggaagtggctttactatgttgccctgctttcttcccctgcccctgccgtccctgggagagagaagggacaggcttagaaaaggccaggactcttctctaggagtggaggagtctgaccagtgagtgacattacctgggaggagtcaggctgggtcactcctgtgtccccagtgtctgccataaaaccacactgcgaatggtccaattgccatctgccaggccctgcccccagggctctgtatggattctcacagcagcactgtgtgataggtactttattgtccgcattttacagaagggaaaactgtggcacagagcggtcacctgacctgcccaaaatcccactgctggtaagaggcagagttgaggacacaacccaggaagtttggatctgacctcctcactctgaaaacatacatgctgcccccatgagggccccaatgggcattcaatacctatttatccaattcagcactcacttccagagaggcagcgtagcccagtggttaagggcatgctctccggagtcagagagcctgaagctgaactccagaactaccccctcccagctgggccactgaacttctccaagcctcagtttcctcacctgcaaaatcgaaatattaagttggtgcaaaagtaattctgggttttgtcattacttgtaatactaatggttggccaggtgcagtggctcatgcctgtaatcccagcactttgggaggccgaggtgggcagatcagttgagctcaggagttcaagaccagcttgagcaacatggcgaagcaccgtctgtacaaaaaatacaaaaattagctggtcatgatggcacgcatctgtagtcccagctactcaggaggctgaggcaggagaatcaattgtttgggcctgggaagaggaggttgcagtgaaccaagatcgtgccatcacactccagccaggtcaacaggagtgaagccctgtctcaaagaaaaaagaaagaaagaaagaaatactaatggttcctaccagcggcgagtcctggctgcttttcatcaaaaggtctccttttcctcccaggtacacaactagactgcatttcccaggatcccttgcaagcaggtagggccatgtgactgagttctggccaatgaaagataaggaggaagtgatgtcaccacttctggtcctggctcctaaaacatcctgcaccatccttcatgctctggaccctgggtccgtgcatgacttcatggagcagatcccatacccaacacttctcctcatactggactgtgatgtgagcaggaaacaagctcttactgtgggattacttgtgttaaaccaagttagcctaaagctgcctccttacatattttaagttcagcctaaaggtttctctgtacatcataaagtataacctaaatggaattataaacagacagtagcctacactcgtaccaatcaccaagttttggccaatcaaatgtggcccactgttcaaaccgtgttcaaataaggcaaacaccaagctataaccaatctggcattttcttggcctccaaaagtgctgggattacaggcatgagccaccatgcctggcctatctctataaattttataactccaaagacctcacgttagtgaggtcatagtatttgtcattttatgtgtgacatgtcatttagtataatgtctttaaggttcatgtgtcagaatttccttcctttttaaggccgaaaatcatattcctttgtatggatggaccacatatcattcatccgttcatccatcagtgaacactgggttgcttccacctttttgctatgtgagtcatactgctatggacataggtatacacctacagaagatggattttgatgccatgactgagatacgggaaaaaaaaaaaacaaaactttttttttttttgagatggagtcttgctctgccacccaggctggagtgcagtggtgcgatctcggctcattgcaacctctgcctcctgagttcaagcgtttctcctgcctcagcctccctagtagctgggattacaggtgcctaccaccatgcccagctaatttttgtatttttagtagatacggggtttcaccatgttggccagggtagtcttggacattctcctgaccttagctgatctgcctgcctcggcctcccaaagtgctgggattacaggcatgagccaccatgcctggccaaaaaaaaaaaaaaaaatgtttttaagaagctgacatttttgaaaatttgagacagagtctcactctgtcacccaagctggagtgcaatgatcatggcggctcactgcagccttgacctcctgggctcaagcaatcctcctgcttcagcctcctgggtagctgggaatacaagtgtgttccaccacgcccaactaattttttgtgttttatgtagagatgaagttttgctgtgttgcccaggctggtctcaaactcctgggctcaagtgatcctcctacctcagccccccaaagtgctgggatgtgagccactgtgcctggccagaagctgatatttgaagtcaatgtcataaaaagggggcaaaccaggaactcccctgactggtttcttgctgggaagaagcctgggggagccattggttggcaaagactttactatctcttgcacagatgaggaaatgaggcacaaagaggaaggacgagcaacgtgctgaaagtcaaactgcccagaagtggaggagggaggatttgaacccagggcctctctgtgaggctgtgccatccagccacccggccactgtgttcatcccttcttatttttatttttatttttatttttttgaggtggagttttactctgtcgcccaggctggagtgcagtggtgcaatcttggctcactgcaaactctgcctcccgggttcaagccattctcctgcctcagcctcctgagtagctgggattacaggtgtgtgccaccatgcccggctaatttttgtatttttagtagagatgggggtctcatcatgttggccaggctggtctcaaactcctgacctcaggtgatctgcccacctcagcctcccaaagtgctgggattatggcgtgagccaccgcgcccggccttgttcatcccttctttcaggcagatggcacaggtttctggctcacgctggtgccagctcagcgacagccctgtcagtgacccaaagccttcttggagacggtggttcctcagtgcccggtggccggctgtgggagtctgagacctattttgttcattatgaatgaaaagcagacgtgattttaaatgtcgtgctttggctgctagtgccgggtggagcagggccccagcgagcagtcacaccagataaaacatattatttaggagtgattggaaggcagacaagctgaaacattgtgcacggaagggctaccgcaattcgctcatgagcatcatagtcactttccccgggctcgtaggtggattcacatttagggcaatttccctcgcggtagctcagctccgtgagtgggctcgggcttgaggcttgaggacaagcgatttcccagccgagtgacttccagcctccacatagagcgcggggctcggtgaggcatggcttccctgaatcaaatccacgctgcccactgagatatgatctcagaagtagctccttggctctcaagactcacgagaagggtgggccgagccctgaccccatggctgagcacctgctgtatatcataaccagcaggccgggcccaggattggtaaagcaggaaacaggcttaaagaggttaaggtgtgcatccaaagtcacacagctgttccccaaggagcttctaaatgttaggaaggcacggctgtctagcaggtgcaaatttttgtggtactggtacttgcacagaaatttagacagaggaggcagtgtagcaccatccagatgatggcacttaggtgattctccggccctctgaagccaaatcctaggagggctcctcagacccctgcgtaagaaatctgaacgtagggtctggggcatcaccacaggctgaggatccctgtgggggaagtggaatgtctttttcacactggggttggaggcggggctgaggctgcagctacagcgaggaggaaggccatggagcccaagagccactagccacagtatttcatgacaggagaccaacaggagccagtgtttagagactgaagttctgggatgggaacactggccccaactccagacacagggcaatgaggcatccggcatttactgaacacccagcaggtacaagacccttggggtttagcgggagggagctgtgggacaatgatgacagatcactaccgggggctctccaagcacccagcgctgggccgagccctcggggagacttactctctgtgggtagcgtgttccttagcatacgccgactaccttagcaagtgttaaaagaaaaactttagccaaattaggtttacaagagttcagctgggtgcagtgactcacacctgtaatcctagcactttgggaggccgaggcgggagcatcacttgaggtcaggagtttgagaccatcctggcctacatggtgaaaccccatctctactaaaaatacaaaaaattagccaggcgtggtggcaggcgcctgtagtcccagctacttgggagcctgaggcaggagaatggcttgaacccgggaggcgaaggttgcagtgagctgagatcacactgctgcacttcagcctgggtgacagagcgagactccatctcaaaaaaaaaaaaaaaactcattttgaaagaaactggaaaattttttcagcacgttcacctggaaagcattggaggaagataaaaatgggaactactgagtttctgtaattattcatctggtgtagaagctggcgctgctgttgaggtaccttccggctcagaggtaaagccaaggccacgtcagataaaccagagaataaatggatagacttgccttctttgtaggcattaaatgtggagacctccagagagaaggagaggttgtgtgggctgggctgcctcagagaagtctgtatttatttactcatacatttatttattcacatgtgaaacagtcaagcacctacttcatcctttgctgaaaagaatttttctcttttttttttttttgagacggagttttgctcttgttgcccaggctggaatacaatggcatgatctcgactcactgcaacctctgcctcccagattcaagcgattcttctgcctcagcctcccgagtagctgggattacaggcatgcaccaccacgtccagctaatcttgtatttttagtagagatggggtttctccatgttggtcaggctcatcttgaactcccgacctcaggtgatcatccacccgccttggcctctcaaagtgctgggattacaggcgtgagccaccacgcccagcctgctgaaaagaatttacagagcacttacagagagtagggtgtcacaactgcagaggtgaacaagacaggcagagaactgccagctggatgctagaggcagggctgctagctgggcaccaggagggtccccaggaatggaagcccccactcctgtcccaccaggaggctctggtttggtaggggagacagacatggggcaaatatgcaaagcatatcctggaatatgaccttggtctgcttcctgctttctgcttaggcagggattggaatagatactgaccggccatggatgggaaaagggaggccccaggatgtgctggtggaccgcctggtccttgagcattgatacatgtcacagggtcaggtgtaaaggctcatgcctgtaatcccagcactttgggaggccgaggctggtggatcacttaagcccaggagtttgagaccagccggggcaacatggtgaaaccccatctatacaaaaaatataaaaattcggctgggggctgtggctcaagcctgtaatcccagcactttgggaggccgaggcgggtggatcatgaggtcaggagttcgagaccagcctggccaacatggtgaaaccccgtctctactaaagatacaaaaaattagcctggtgtggtggcacgcacatgtaatcctagctacttgggaggctgaggcaggagaattgcttgaacccgggaggcggaggttgcagtgagccgagatagtgccattgcactccagcctgggcgacagggcaagactccatctaaaaaaaagaaaaaaaattttgaaaattagctggttgtggtggcaggcacctgtaatcccagctactcggtgttggggtgggggctgaggaaggagcatctcttgagcccaggaagtcgaggctgcagtgagccaagacagcaccactgcactctagcctgggtgacagagcaagaccttgtctcaaaaaaaaaaaaaaaaaaaaaaagatgtcccaaaaccactctgacctgagtccggagtcttctcccctatctgggtttctggggcctctcattgtccccagagaagttcaaaggcaacactgggctccattgaggcaggggatgcagggttcaaaccctgacctcatccctgtgcagcctctgtttcacccgaccctaccagcttagccacctccggaggttatccacaagataggtcccatgcctgctcggcggggggttccttcccttctctgcctggggcaggcatgcatggcccacatgaggggccagcccgaaatgccagcaaattagtgtcccaggagtgaccctcaatcagtgagagggaggaggtgggcagttcttaggggtgcccccacacagtagctcagaggtcccccacaaaaactgagccctagttgcaccctgttccaaggactattgtagcaaccattttactatgcctgcggatttacagatccaaaattcagaccaagcacacgggggaacgcttggctctgccccgcagtgtctgagaatccagctgggaatactggaatggttggcgggcaacttcaatgcctagagataaaaaaaaccctgtggtggcatctttccctgaatgccaggcactaagctgggatggtctgaatcctcagctcagctggggcagatgactgaagtgcccacacatggcctcgtcacgtagcttgggcttcctcactgcatggcggcctccagtagtcagatttccaatagggcagctcaggggctccagtggacaaggcaggaagctgcattgccttttatgacctcatcagggatggaagttacacactgtcacgtttgctttgctatattggctgaagttgtcacaagtccacccagattcaatggaagggggtgtagactctacctcttcatgggaatttgtggccattttaaaacttcccccaccccagctgctggcagggcatcctcgattggctctcctcccctcctggtctctctgcccctcacccacactgcctgcacccaggtgtttgtctcagccactcactaactgtgagtccctaatctctcccagccttggtttccttagctataaaatggggatactaatggtcctgcctcccagcgtcagtgtgaggagtaaccgagatgcacacatgcagtgtttgtagctgagtgcttagtatagagattagccttttttttcttttttcttttttttagacagaatcttgctctgtcgcccaagcaggctggagttcagtggtgggatcttggctcacagcaacctccaccttccgagttcaagcgattctcctacctcagcctccggagtagctgggactatggtgtgcgctaccatgtcccgctaatttttgtattttttgtagagatggggtttcaccatgttggccaggctggtttcaaactcctgacctcaggtgattcgcccactttggccttccaaagtgctgggattacaggtgtgagtcacccaccatgcccggctggaggtttgccatttttatgaactatttcctcatgattgtggctaaagccagctcttgtatccagtaacttcactccgaaaaattggtggtgcttcactcacagtcctgggtcccaaatctctcttatgcaggctgcccactcccttgaggatgacagcaacccagagggcagctaaggttacggcttaggaatttggcaggtgtgagcaattgcattttcaaataactgcaacagcgtctccctcctatcccacgggcttacccacaaggtgactgattctcctgccatcaaaaagcaatgtctgtgtcccctcctcttgaatcagaatgggcttttgttgtctgttgcaaccaatacaggaagacagaggtgatttcccaagcaaggtccaagaggcaggcagtgtctaccttgctggccagactatctctcttgaagaagccttgagccaccatgtgagcagtccaaggccctgagactgctgcgtggtgaggccacaggaagaggacctgacattcataaagacagacagaggctcacttagcccccggtggtcccagacgccccgccaacagcagcttctgcccgcccctgctattccggctccagtatctgattgtagccccacacacgagatgctcccctgccagaaacacccagctaagctctcccaaattcctcacccacaaagtaagcataatagaatgcttgttttatggtgctaaagtttggggtaatttattacttagtaagagtaaccagctgggtgcggtggctcacacctataatcccagcactttaggaggatgaggcaggcggatcacccgagatcaggagcttgagaccagcctggtcaacatggcgaaaccccgtctctaataaaaatacaaaaattagccaggcgtggtgatgggcgcctgtaatgccagctactctggaggctgaggctggaaaatcgcttgaacccaggaggcagagtttgcagcgagccgagatgacgccactgcactccagcctgggtgacagagtgagattttgtctcaaaaaaaaaaaaaaaaaaaaatagtaaccggagcaccaatttaggaagcatcctgtagcaggtagcagtgtaactgggcaacaaaacctgttcccacttagcttgccgctctctctcctgagccagtcatgcctgcaggaacatctcaaaggtcgccctcccatgccagcctggcacctcaatgctgtatgtttcctaaaagcacagctttgaggcctccaaaggggcaaagtgtggtggattggcaaagtgcagtggctcatgcctataatcccagtgctttgggaagctgaggctggaggatcgcatgagaccaggggttcaagaccagcctgggcaacatagcgagatcccgcttctatttcaatttttaaattgtttaagtgtgctgggttatctgacacttctgtgacctcctagtgagaactaaacaccagggatcagcaacctggaccccttcacaagggtttccaaagggaatcctttggccccatggcacttctatttatttatttagagatggagtcttgctctgtcgcccaggctggagtgcagaggctcactgcaacctccgcctcccaagctcaagcaattcttctgcctcagcctctgagtagctgggattacaggtgcgtgccaccatgtccagctaatttttgagtttttagtagagatggtgtttcaccatgttggccaggctggtctcaaactcctgacctcaagtgatctgcctgccttggcctcccaaagtgctgggattacaggcgtgagccaccatgcccggcccccatggcacttctgtgacattgatggggaaagtgcagcagaactaggcatggcagaatccctcttgcctctcttgaaggatggtgatacctgtctgggccctggtagggtttgatctgccctcatggcacctccacctactctgaaaatcctcaggcggaggctgggcacggtggttcttgcctaaaatcccagtactttgggaggctggggtgggagaattgcttgagtacaggagtttgaggccagcctggacaacatggggaaaccctgtcgctacaaaaaaatacaatactagctgggtgtggtggtgcacgcctgtagttccaactactcaggaggctgatgcgggaggactgctgtagcccagaaggtcgagggcgcaacgagccaagatcacgccactgcactccagcctaggtccacagagtgaggaaaaaaaaaaaaaaacctgtcccagctgggatgcgagtgccctcctgctgaaggcaggagtcaggccgaggcagcaacaggaagagcaagatagaagctgcctggcctcactgtggtctctgccactgagtggaaatatttccagttcggtggcttagtccttgcgacgcagcccttgaccctgttggtgataccaattctcaagctggtctcaaactcctgagctaaagcgatcccccagccttggcctctcaaagtgctaggattacaaccgtgagccactgctcccagtcctgcccctacatattatatactgtatttatacagcaacatttaactagaaaaaagaaaatgctattaagaaaattgtctggggatgggcgcggtggctcacacctgtaatcccagcactttgggaggccgaggtgggcggatcacctgacatcaggagttcgagaccagcctggccaacatggtgaaatgctgtctctactaaagatacaaaaattagctgagcgaggtggcaggtgcctgtaatcccagctactcatgacactgaggcaggagaatcgcttgaactcgggaggcggatgttgcagtgagctgaggtcgtgccattgcacaccagcctgggcaacaagagcaaaactccaccttaaaaagaaaatcatgggcaggcacggtggcacacaccgttcgggaggctgaggcaggcagatcacctgaggccgggagttcgagaccagcctggccaacatggtgaaaccccgtctctactaaaaaacacaaaaattagcagggcttggtggtacagacctgtaatctcagctactcaggaggctgaggcaggagaatcacttgaaccagggaggcggcggttgcagtgagccaagattgtgccactgcactccaggtcaaaaaaagaaagagaaagaaaggaagcaaggaaggaaggaaggaaggaaggaaggaaggaaaaagagagagaaagaaagagaaagaatataaaatcacctgggcacagtggccctttaggagtccgaggtgggtggattgcttgagcccaggagttcaagaccagcctgggcaacatggtgaaaccccatctctacaaaaaatacaaaaattagtgtggtggtgcgagcctgtagtcccagctactcgggaggctgaggcaggaggatcaaccacctgagcctgggaggtggaggttgcagtgagccgtgattgggccactgcactccagcctgggtgacagagcaagaccctgtctcaaaaaaaaagagaaagaaaatcatgaggaagagaaaatatatttactattcactaaatggaatcagatcatcataaaggtcttcatccttgtcttcacgttgagtaggctaaggaggaggggaggaaggaaagggttgctctggttgtctcctgggtagcagaggtgaaagaaactccgcatccctgcggacctgcacagttcaacccgtggtgttcaaggctcagctattttcacccagctttcgtatcctcattatgaactaaagattaaactctttttaaaaatggatgtttaggctgggcacagtggctcatggttgtaatgctagcactttgggaggctgacgtgggtgaattgcctgagctcaggagtttcagaccagcctgggcaacatggtgaaaccccatctctactaaaaatacaaaaaattagctgggtgtggtggcacccgcctgtagtcccagctactcaggaggctgaggcacgaggatctcttgaacccgggaggcggaggttgcagtgaaccgagatcacgccactgcactccagcctgggcaatggagcaagactctgtctccaaaaaaaaaaaagaaaaaaaaaagatttttaatcacataaataatgcataaaatattactacttctttaaaaaaattttaaacatgattttaaactttaaaaaaagacattttaaacatttaaacatgacagtcctgtgactgtctgttttgctcactgtctcatccccacatccattcccagctctccagaggttatctctgttattttgtggcagctgcctcgggtatttttctacgtatttgcatgcatatacacttatcctttgaaataaacagtgtggtttgtgtgcatttgatttgttttcacacaaatggatcggacagatcacatcattctacaacttgctttttttactcaataacacatcttgtaatttaccaatgccagcaggaaaagaaggagggaaggacctcagatctgagagaagctgggcagacaaacctcaggggtgaaggccctcattggacaaactactcgttggtcactggacacttgtcttcaggacactcccctgtgctctccagaggcttatctggtttatctctcttttttttccttttctttctttcttttttttttttcatctttaccacttcttccaggatagtttatcttggcaaacaaaccacaatccgttctctgcatgaaacatctacaagtcccaggttctaacatatgaaaacaggtcaggcacagtggcagatgcctgtaatcccagcactttgggaggccaaggtgggcagatcacttgaggtcaggagttcgagaccagcctggccaacatggcaaaacccgtctatactaaaaatacaaaattatccgggcactgtggcacgcgcctgtaatcccagcatctcgggaggctgagccaggagaatcgcttgaacctgagaggcaaaggctgcagtgagctgagattgtgccactgcactccagcctgggtgacagagcaagacttggtctcaagaaaaaaaaaggaaagaaaacatccttctctttcactgaagcatgaagtggactgtggctagtgggagggggcatctctgtgaggcatgtttatgaaaaggcagtgcaggcctgggcctgtcctcagcactggcccttgtcaaggcctgtttccttgagcctggagtcctttgggagctgtgagaaccaaaagagaaacggcacacctgtacatttactcatccttttaatttaggcaaggattcttcattcttcaagagatgacaacaaatttgggcttttttttttcttttttaagacagagtcttgctctgtcacccaggctggagtgcagtggcacgatctcggctcactgcaacctccacctctcggattcaagcaattcttctgcctcagcctcccaagtagctgggattacaggcatgcgccaccacgcccggctaatttttgtatttttagtacggccggggtttcaccatgttggtcaggctggtctcagactcctgaccttgtgatccacccgcatttttttttttttcgagacagaatttcgctcttgttgtccaggctggagtgcagtggtgcgatctcagctcacagcaacctctgcctcctgggttcaagcaattctcctgcctcaacctcccaagtagctgggattacaggcatgaaccaccatgcccatctaattctgttttttttgtttttgtttttgtttttttttgagatggagtatcactctgtcacccaggctggagtgcagtggcatgatctcggctcactgcagcctctgcctcccaggttcaagcaattctcctgcctcagcttcctgagtagctgggattacaggcacatgccaccacgcccgactaatttttgtatttttagtagagacaggatttcacaatgttggtcaggctgctctcaaactcctgacctcaggtgatccagccacctcggcctcccaaagtgctgggattacaggcgtgagccaccgccccttttgtacttttagtacagatggggttttgccatgtttgccaggctggtctggaactcctgacctcaggtgatccgcccaactcagcctccaaaagtgttaggattacaggcatgagccaccgcacctggcctgcctggcctatttagtagctttaagccactcccaagtggctacatcccaacttccatagggatacaatccacattgtttttcgttttatgattcccctcacacttgttccctcctttgacattgctttattgccctctccagttctcttctcttcccaaaagcccaaagcaacaatcagggatggctaaggtagccgggctggtcgtttttttttttttttttttttttgagacaaggtctagttgtcgcccagtgtattagtctgttctcaagctactaataaagacatacccaggacaggtgatttatatatatatgaggtttaatggactcacagttccagatggctagggagggctcacaatcatggcagaaggtgaaggaggagcaaagtcacgtcttacatggtggcaggcaagagagtgtgtgcagggaaactgccctttgtaaaaccatcagatctcacaagactcattcactatcacgagaacagcctgggaaaaaccacctccatgattcaattacctcccaccggttccctctcatgacacttggggattatgggagctacagttcaagatgagatttgggtggggacacagccaaaccatatcacccagactggggtgcagtggtgcagttatggttcacttccacctcagccttccctggctcaggtgatccttccacctcagccttccaagtagctgggactacaggtgtgccaccatgcctggctaatttttttttttcccctttgtagagacagggttttgccatgttgcccaggctggtctcaaactcctaggctccactgatcctcccaccttgacctcccaaggtgctgggattataggcatgagccaccatgcccagccatgggtggtcttttatgggtccttttttagtttttgtttttgttttgagacagagttttgctcttgttgcccaggctggaatgcaatggtgcagtcgtggctcactgcaacctccacctcccgggttcaagtgattctcttacctcagcctcctgagtagctgggactacaggcatgcaccaccacacccagataatttttttttttttgcatttttagtagagacagggtttcaccatgttggccaggctggtctcaaactcccgacctcaggtgattgcctgcctcggcctcccaaattgctgggattacaggcgtaagccaccgcgcctggctgggtccttttttttctactccttccttgactaactcatcccagttctctcaggactttcctggttttagcactgtaaagctccacactccaggaatctcttccttcctgaatggctgcttaccctacctactcccccaagccccaccaatctaatacatcacatggaagagaaatttttttctttttttgagatggacttgtgcttttgtcacccaggtggagtgcaatggcgcaatcttgcctcactgcaacctccacctcccgggttcaagagattcagaagagaaacttctgttggtccctgtggtagacagaattctaagacggcccccgggttcctgtcccctcgtgtacacgccctgcataaccctctcacctagagtgtaggtgagatctgtaaatatgatcggatcttgttcctgcggttaggttactaatcagttgattttttactccatcaaaagaaagattcttctggatgggcctgacctaatcaggtgagcctttaagagaaggtggagtgtcagagggaagcattcactcctgctgctcctgaacaccctgctcccataaattctacagctgcaagaaaggagttctgccaaaaaacacatacgcttggaccccaagcctcagatggaacctcagccccagaaacacatttatttcagccttgtaagccctcaagaagagagtccagctacactctggcatgacttatgacctacagaactgtgagataatatacctgtgtggttttaagctgctaaatttgtggttgtttgttacacaacaatagaaaactaatatgatattattaagggcagccttccatgtaagagaaagctatgtaactatggctagttcctcagtgtgcctgagccattgtgaataatgccgacttctctctctctctctctctctctttctctctctctctgggtaggccaggcacggtggctcacacctgtaatcccagcacgtgagaaggccaaggcaggaggctgaggtggaaggatcacttgagtccaggaggtcagggctacagtgagccatgatcacaccactgcactccagcctgggtgacagagtgagacctgtcttaaaataaataaataaataagccaagctcagtggctcatacttgtaatcccagcactttgggaggccaaagtggacagattgtttgaggccaggagtttgagaccagctgggccaacatggagaaaccccgtccaaaaatacaaaaattagctgggaggatgtggaggtacaaacctgtattcccagcttcttgggaggctgaggcacaagaattgtttgaacccaggaggcagagattgcagtgagctgagatcacgccactgtactccagcttgactaattcaagactctgtctcaaaataataataataataatttctaccaggaggcagagattgcagtgagctgagatcacgccactgtactccagcttgactaattcaagactctgtctcaaaataataataataataatttctaccaggattctggatgcgtcacttgacttcactgtgcctgactttctttgttataaaatggatctgatgttcacctacttcgccttacaaagatgatggaaaggacaagaggataagagagagagagtaattccgcacctcaaaaggaaaatgaacaaattcgagtccaatcctttctttttgtgtaactctgtcatagacacggaccgttttgtctgctgggtaaacactgcatcaacacagtgcatttggagagaatggttccgtcgttccactccaacttcatggttgatggggctccaaccttggccactcttgattggtttagggatgatacctgacctttctgagccaatcggaatcttgccttgtgattctagaactgagatggcaaagtcagtttcttttcagtagctgaaaatgaagtcatgtaaactcctaagttcatctgaggctaagcagggctgtttgctccaatattccatcatccaggctgaggaacaaaaatagcaggttggccacaggaaagaaggatgaggccaaaagaggtacacaaggccgggcgccatggctcacgcctgtaatcctagcactttggaaggccaaggcgggtggatcacttggggtcaggagttcgagaccagcatggccaacatggtgaaaccctgtgtctactaaaaatacaaaaattagccagtcttgctggggcgtgcttgtagtcccagctactcaggaggctgaggtgggaggatagcttgaacctgggaggcagaggttgcagtgagctgagatcgtgccactgtactccagattgggtgacagagcatgaccccgtctcaaaaaaaaaaaaaagaaaagaaaagaaaaaaaagaggcacatgagatttaccaaggagagagctgaagagagcacttcctgactggccagcctttcccatgcaccaacctcagactgtctgtggtatgcatttcacaagcttccccagcatcactacagcacgtccccagccttctttccactcctcaaagttctattttatttatatatttatttattcattttgagaaagtgtcttgctctgttgcccagagtgatcatggttcaccctagtctccatctcctgggctcaagcaatcctcccacctcagcctctggagtggctggtactacaggtgtgcactaccacacccagctactttttttttttttttaattttttttagagatggagtctcactatgttgcccaagctgttctcaaactcctggactcaagtgatcctcccacctcaggctcccagggtgctgggattacaggcatgagccactgtacccggccaaagtttatttcctggggtgaatacatttttcattgtggtaaaatataaataacataaaattggccgagtgcagtggctcatgcctgtaatcccagtactttgggtggccaaggcgggtggatcatgtgaggtcaggagttcaagaccagcctggccaacatggtaaaaccctatctctactaaaaatacgaaattagctgggcatggtggcacacacctgtaatcccagctacttgggaagctgaggcaggagaattgcttgaatccagggggtggaggttgcagtgacccaagatcatgccattgcactccagcctgggcaacaaaagttgaaactctgtctcaaaaaaaaaaaaaaaatccgccagtgcagtggttcacgcctgtaatcccagcactttgggaggccaaggcgagaggatcgcaaggtcaggaattcgagaccagcctggccaatgtggtgaaaccccgtctctactaaaaatacaaaaattagctgggcatggtggtaggtgcctctaatcccagctacttgggaggctgaggcaagagaattgcttcaaccagggaggtggaggttgcagtgagcctagatcgcgccattgcactccatcctgggcgacagagtgagactctaactcaaaaaaaacaaaaaaaatcgactgggcatagtggtgggcacctgtagtcccagctactcgggaggctgagggaggagaatcgctagaacccaggaagcctggtcaacagagcaagactctatctcaataataatcatcatcataacaacataaaatttatcattgtaaccatttttaagtgtacaattcattggcattgttatgcaaccatcgccaccatccatctccagaattttttatcatcacaaacaggaactctctaccatgaaacaatgacttaccatttcctccctcctcccagtccctggtaacctctattctaccttctgtcactgtgaattggactactccaggtacttcgtataagtggaatcatgcaacacttgttctattgtgtctggcttaatttatttagcataatgttttcgagatgcacccatgttatagcatgtgtatatcagaatttcattccttaaggccaaataacattccattgtatctatatgccacattttatttatctgttcatctgttgatggacatttgaattatttctacattttaccaaatgtgaataatgccgctatgaacattggtgtgagacaaatccctggttgttgttttgttgttgttgttgttgtcgtcgagacagagtctcgctctgtcatccaggcacgagtgcagtggtgtgatctcgactcactgcaacctctgcctcccagattcaaatgattctcctgcctcagcctcccgagtagctgggattacaggcgcccgccaccatgtccagctaatttttgtatttttttttcttttttaagtagagatggggtttcgccatgttggccaggctggtcttgaactcctgacctcaggtgatccacctgccttgccctcccaaagtactgggattacaggcacaagccaccacacccagccctgatccctttgtcaatcagcgataatttttgtttcagatgatcataagatttctatctaatacaggaaatgagaaactgtaaccccgaaagccagatgacctcctgccttcccagaatgaataatccaaccctgatgtgtccccagacccatctggaattctgaatggggaaatctaggtaggaatgaagtctgggaactggaaaatgaaggatactttttgtacgattccaccaggggcctggtagtcaagagaatgagagtagtaatttaagatagtggggtttggcacgtacaagctatttagcaagcaggcattatggaataaacacgcaagcagaagctcaaagagaagaaatgttcaaaacatgacattgttttcatctttttagcctcagaacgtggtaaattcattcacacatgatttgtttttgtctacattcactaagcatctaatatatgtctaccaggacggagactgttgtgctaagcacaccagaaatgacctctgacatcttgtaacatccagtctagcaggggctgcctcatagtaagtgttcagtacgtgtgtgtgtgtttgtttatttgtttgtttgtttcgaaaaaggggctggctctgttggccaggctggagtgcagtggcgtgatcttggctctctgcaacctccacctcctgggctgaagcgatcctcccacctcagcctcccaagtagctgggattacaggtgcgcaccaccacacctggctatcaatacatattttgcatgaaatatttagtaatcatttctgtatgcttcgtggcatttaatatgcagccagtttttgacaaatgtcatgcttgaacaagtttctcacaatccaaagtgaaaagtctcccagatcatacacaaaacaaaaccaaaatacaatagctggggctggtcgatctgaaggggatatacccaatcttgcaagggtttctttggctgagtttttcccacaagccagtgagctttgtattcacaggcaaaaccccgcctgagacacctgtcagccaccaccattacttgctgcaataaaggtatagatgaatgttctcagactttttgagggtagatttgagagaccacctagaggcctaaggtagaaaatcaggccatatcatatggtcagaattgatcctatttataatagccagttaaatatatgtgagtaactcttctgtgtaaagacctcattacaatgaaagtatctccaggcaatcacaaggatgaggggaaaacaaaatattaaaaatgaaagtaaaaatattaaaggtttaaaagctacagtatcagccaggcacggtggctcacacctcttatcccagcattttgggaggccaaggcaggcagatcacttgaggtcaggagtttgaaaccagcctcgccaacgtggtgaaaccctgtctccactaaaaatatacaaaagttagctgggcatggtggtacacacctataatcccagctactcgggaggctgaggcaggagaattgcttgaaccagggaggcagaggctgcgagccgagattgggtcactgcactccagcctgggacacagggcgactccatttcaaacaaacaaacaaacaaaaaactacagtattaaagtgcatgggagggagaacaacagctgacaagaagtactaatacagatacgtgactcacgcctataatcccagcacttttggaggccaaggcaggaggatcacttgagctcaggaattcaagaccagcccaggcaacatggtaagaccctcatctctatgaaaaaacattattaaaaaacaatttctggccgggcgcggtggctcacacctgtaatcccagcactttgggaggccgaggcaggtggatcacgaggtcaggagatcgagaccatcctggctaacacggtgaaaccccatctctactaaaaataccaaaaattagccaggcgtggtggcgggcgcctgtagtcccagctactcgggaggctgaggcaggataacggcgtgaacccgggaggcagagcttgcagtgagcagagatcgcgctactgcactccagcctgggggacatagcgagactccgtctcaaaaaaaaaaaaaaaaaattttctatgccgggtgcagtggctcatgcctgtaatcccagcactttgagagaccaaggcgagtggatcacttgaggttgagagttcgagaccagcctggccaacatgttgaaaccccgtctctactgaaagtacaaaagttagccgggaactgtggcaggtgcctgtaatcccagctactcaggaagctgaggctggagaatcccttgaacctgggaggcagagagtgcagtgagctgagatcacatgacttcactccagcctgggcaacggagcgagactctatctcaaaaaaaaaaaaaacaatcctagaaggcacaaatcacaaattggatggcagagtagccataaagcagagcagaagccaagaatctttgcaggccggacgtgatgactcacacctgtaatcctagcactttgggaggccgaggcgaaagacacttgagcccaggagtttgagaccaggctggaaaacatggcgagactttattgctaccgaaatttaaaaaattagctgagcatggtggcgtgcacctgtgcttccagctactcaggaggatgaggtgggagggggatttcctgagctcaggatgccaaggctgcagtgagctgtgtccacatcactgcactccagcctgggcgacagtgagacctgtgtcaaaaaaaaaaaaaaaggctgggtgaggtggctcactcctgtaatcccagcactttgggaggccgaggcgggcagatggtttgaggtcaggagttcgagacaagcctggataacatggtgaaaccccatctctactaaaaatacaaaaattagctgggtgtggtggcaggcgcctgtaatcccagctacttggcaagcagaggcgggagaatcgcttaaacccaggaggctgcagtgagccaagatggcgccactgcactccagcctcggtgacaagagcgaaactccatctcaaaaaaagaaaaaaattcaggaaatcgacccaaaaaggctactagaactaataagtgagtttagcaagttttagggataaaagttctatctaaaaagcaattaggctgggtgtggtggctcatgcctataatccagcattttaggaggctcaagcaggataattggttgagcccatgagtttgatgggcaatatagtgagaccctgtctctactaaaaaataaaaaactaaccattgcatggtgacatggggctgtagtcccagccactccggaagctgagatgggaggattacttgagccggggaggttgaggctatcgtgagctgtgtttgcactactgcactccaggctgggtgacagagcgagactctgtctcaaaaccaaaaacaaaacaattaatttctgtacatcagtaataaataattgaaaatcaaaatgttaaaacatatcatttacaacagcaccaaaagccatgaaatatttaggtataaatccaacaaaatatgtgcaggatctgtacactaaaaactataaaacactgggccagaaattaaagaccaaaattaatagagtgatatataatgttaatagattggaagacacactattgttaagatgtcagttttctccaaattgatctatagattcatgatttcaatcaaaatcccaacagatatttatttatttatttatttattttagagaacaagtctcgctctgtcgcccaggctggagtgcagtggtgtgatctcggctcactgcaacctccgcctcccaggttcaagcgattctcctgcctcggcgtccgaggtagctgggattacaggctcaccccaccacgatctgctaatttttgtatttttagtagagatggagtttcgccatgttggttggccaagctggtctcgaacccctgacctcaggtgatccacctgcctcagcctcccaaagtgctgggattacaggcgtgagccaccacacccggcctagattttttttttttttaagatatcaacaagataattctaaaatttatttgctaagacaaaggaacttgagtagccaaaacaattttgaaaaagaagaacaaagttgaaggacttacactacctgattttaagatttactgtaaagctacagtaatcaagacagtatggtgttggggaaaagatagctacatatgtcaatggaacagtatagagagtccagaaatagacctacacgtttgtggctaattcattttttttttaaatgaaggtacaaaggcaattcaatgaagaaagaatagtcccttttacaattggtactgaaacaatcagacacccttatgataacaaaatgaagccaggtgtggtggctcatgcctgtaatcccagcactttgggaggctgaggcgggaggactgcttgaactcaggagttcaagaccagcctgggcaagatggtgagacctcatttctactaaaaaaagaaaaaaaaaaatagccaggtgtagtggtgcatgcctgtactcccagctactgggtaggctgagatgggaggattgcttgagccccagagattgaggctgcagtgagccatgtttgtgccactgcactccagcctggacaacagagcaagaccctgtctcaaaacaacaacaacaacaacaaagaatcttgacccgtacctcacacttgatgcaaaacttaactcaaaatggatcataggcctaaatgtaaaacctaaaactataaaacttctagaagaaaacataggagaaaatctttgtgaccttaggctagacagttctcttattagataagataccaaaagtacaatccatagaacaaaacattgataaattgggcatcattgaaatgaagaacttcttctattcaaaagacaaaataacagaaagacaagccacagactgaaagaaaatatttgcaaatcatgtattttataaaagacttgtatacagtatataaagaaccttcaacgtccccaaattttttaaaaacccaacttctaaaatgggcaaaacttttgaacagacagttcatcagagaacatctacaaatggcaaataaattagcagagttgtttgctgaaaccaaagcaaaacaaaatatcaaatggcaaataagcatagaaaaagatattcaacttcattagttattaattaaatgcaaattcaggccaggtgcggtggctcacgcctataatccaagcactttgggaggccgaggcaggtggatcacctgaggtcaggagttcgagatcagcctgatcaacctggtgaaaccctgtctctacaaaaaaatacacacacacacaaaattagccaggcgtggtggcacgtgcctgtaatcccagctacttgggaggccgaggtaggagaactgtgcgaacctgggatgcagaggttgcagtgagctgagattttgccattgcactccagccttggcaacaagagtgaaactctgtcttggaaaaataaataaataataaataaataaatgaacttcaaaccacaatgagatgctacaacacacctattagaatggctaaagttggccaggcgtggtagctcacgcctgtaatcccagcactttgggaggccgaggtgggcaggtcacgaggtcaggagttcgggaccagcctggccaacatggtgaaacctcgtctctactaaaaatacaaaaattagccgggcatggtggcacacgcctgtagtcctagctactcaggaggctgaggcagacgaatcgcttgaacccaggaggcggaggttgtagtgagccaagattgcgccactgcactccagcctgggtgacagaacgagaccccgtctcaaaaaaaaaaaaaaaaaaaaaggctaaagtttaaaatgctgaccagactcaaatgttgtcaagtaggtaaagaaactggaaaactggaatgttcacatgttgcttacaagaatgaaaaaaactgaaaaatggtacaagcactttgttgtttctgtttgttttgttttgttttttagagacagggtctcacgatgttgcccaggctggtctcaaactcctgagctcaagggatcttccctccttggcctcccaaagtgctgggattacaggcgtgagccaccacgcccagcaataaaactgtttaaagaaatattggagccaggcgaggtggctcatgcctgtaatcctagcactttgggaggctaaggtgggtggatcatctgaggtcaggggttggagaccagcctggccaacatggcaaaaccccgtctctactaaaaatacaaaaatcagccatgcatcgtggtgcatgcctgtaatcttagctacttgggaggctgaggtagtagaatcatttgaacccagaaggaggaggttgcagtgtgccaagattgcaccactgcactccagcctgggtgacagagtgagactcaatatcaaaaaaaaaaaaaaaaagaaaaaaatatatgtatgtgtatatatatgtatgtatatatatgtatatatgtatatgagatgctagaagacaataagagatgccttcggtcttctaaaggagaattatttacaatccagagctctataactagctacatcattaattttgaggggccagctgagttggctcatgcctataatcccagcactttgggaggccaagacagaaggattgcctgagcccaggagttcaagaccagcctgggcaacatagtaaggccctgtctctattaaaaaataacgtttttttttaaagtgtgaaggccgaatagattgttttggaaaagtgtggtaccaaaaaatttactagccaaatttactaagtttctttgaacttacttgagagtgtagcactactctatggtaccagcagggtggtacgaggccaaaggtggaatcggggagatatacagtcactttcctgtcaacaatggacagcatatttgacggtggttccatgaaattataacactgggccgagcttggtggctcacacctgtaatcccagcactttgggaggctgaggagcgtggatcacctgaggttaggagttcaagactagcctggccaacatggcgaaaccccatctgtattacaaatacaaaaattagctgggtgtggtggtgggcgcctgtaatcccagctacctgggaggctgaggtagagacaattgcttgaagccgggaggtggaggttgcagcgagccacaatcatgccactgcgctccagcctggaagacagagcaagactcggtctaaaaaaaaaaaaaaaaagattataacactgtatttttactgtatcttttctatgtttagatacatgaatacctaccactgtgttacaactgcctacagtagtccatatagtaccatgctgtacaggtttgtgacctaggagcaatagcctaccccatatagcctaggtgttgtagtaggctatactatcttggtttgtgtaagtatgctttgagatgttcacatcatgatccatttctcagaacatagtcccatcactaagtgacaattacatatatacatatacatatgcattccctattaaaggtagattctaatttactctcagatgctaagacaaagagaactattccaatcattggatcactcctattgctccaaggcatgcctgtatccctcagtcagtgttggagagtcttaataattctatttttaaattttcagatttcatgctgacatgctccttagtctgcacttgaaattccagtggacacttgacattggaaaaggtctgctctggggacctgtgaaaatctctaaatggagaattctctcactcacgatttatcgctataagctatttctgcctcagagatataaacaacgcagatcttgggatggcaaggcaaagcttccccaaattacaaatgaccagatgctgagggtctttagggtagttaacgaattctggaaaccacccatgttatatcctttaaaatctactgtacaacattctccatgcttatttttttctcttgatgtatttgaaaaatcatgttactattcaaacatatttgctgtttctccctggagatggactatatttctctgccacttgatcagtgcttggccacggcttgctttggccaattaaatgtgagcagaagtgccatatgccaccaacttctaggcaaaagctttaaaagccaatgtatgcttcatacttctgcatcttattgacaacaggcaaacattcttcaaccaataaaacatgaacaaaagtagtgcctagcatttgaggaagaagctttaaaaaccagttcgtgctttgtcactcgcttcttcctctgccctgataaagtttaatgttccagacagaggctgctatcagccttggctgaagagtaaacaggacacgtagtggaggcaacaccatgttcatgtatccagtgagaaataacctgtattgttgtaagctactgaggttttaaggcttgttactgtagcataacctagactctcctcattgatacagtttcattttagcgtggcttctagttggtaatatctagaggcattgcaatgttatcaataggaatggtttgcaaaactagtcacaaccacagtatgtggatttttcttttcttttttttttttttagactgagtcttgctctgttgcccaggctggagtgcagtggcacgatctcggctcactgcaacctccacctcccaggttcaagtgattctcccacctcagcctcccgagtagctgggattacaggcacccgctaccaagcctggctaattttgtgtgtgtgtatttttttgtagagacagggtttcactatgttgaccaggctggtcttcaactcctgacctcaggtgatccgcctgtgagccactgcacccggcttttttttttttttttttcgagacaaggttttgctcttcttgcccaggctggagtgcaatggcacattctcagctcactgcaacctccgcctcctgggttcaagcgattctcctgtctcagcctcccaagtagctgggattacaggtgccctccacacgccttgctactttttgtatttttagtagagatggggtttcaccatgttggtcaggctggtcttgaactcctgacatcgggtaatctgcccgcctcggcctcccaaagtgctgggattacaggtgtgagccaccacacccggccgaatttttcttttttaacctctaagaatctttccctgtcttctttggacaagatcatctcattcattcatttcacaaatactgagagccaaccaaatgccaggcattggtgctaggtggtagggagagcaattaacaagacaaacatagaccttatgtcagcagaggctttattctagtggaaaaggcagacaataaacatataactgcatgatgatttaaaagcaactgtgataagtgctataacaagatgatgaagtctagggtgttagtagaacaattaacagtgaacatgacaagctcagggtcatcttcatcttctgtgcccccaaatataagtgacctgctcaaagttaaccagtaaaagaggggaaaacaaaactgtcttcctacttagggattctctggtctttggaccaaaccttggaatacaacttacatttgggccaatagccttgttttccctatttatactcatagggaaagccagctggaatatgcatgaatcaacattctaacctcagagatatatttctaaaattcaaaacagaagttatcactgatacttggttcagctgaacgactgtgttcatgaaagttgataccattgccattccttgatttttacaagcatagcaaacttaaaacgctcaacacacccagaatgggcaataaatggatgtgttggcatggtcctcctcgtgctggcacttcaacaacacagcaagctatgtacttttgaacaggggttggaacattttttctgaaagcaatcttcaatcttgcaattttgccaaattcttttattttgccataatctatgaattattctacttggcattattgaatgcaaaataagtttactaagcacctactatgtgccacaccctagggatacagggaaaaataagtctctgctctaaagtaactcacagtctaggaaagaagtcattaacaaataaataactatactttggttattggtcaagtattcctcatacttctttagaatgcccaaagctctcttggcataatgacacagtgaggggtgagggtggggtcatcaaggaaagttatatgggacttttttccccaagaaagggtcttgctctgtcacccacgctgtactgcagtggcgtgatcatagctcactgcagccttgacctccagggctcaggtgatcctcccactccagcctcccaagtagctgggactacaggtgtttgccaccacgcccagctaattatattttttgtagagacggggtctcactatgctgcctaggctggtcttgaatttctgggctcaagagttctgcctgccttggcctcccaaactgctaagattacaggcgtgagctaccgcacccggcccgtattggattttatttatttccttttcttggtgctcatcctccttcacaacttcaagatgggcataagatgtttgacaacatggttcttcattaagtccaactccttatcataatagggcttgggaaatattaaacacgagggcaatcgtgctaacacaaaaatgggcgccccctaaaccttgttacttgtttgctcacttataagaagagccaactcaaaggctcaactgaattctagcactaagattccttccttgctgtagaagatctgtacctggtcacttccattaaagttacataggcgttccaagaagcctcctgcaatacagttgtgactcagccggtatgggagtaatgacggtcctgtggtatttcctgcacccccagagtcccagagtttgttaaggaccgtgtaagaggacaccacgctggcttttcagtgggcgcgtctctcctgggggcatcaccagacaaccccaggcggaagtggcggtggcccatcctcatgcaaactgcagtgtaagaactggggcccgggactcctcgcaaatgtgggacactgacattctgtgatgctgtcccaatgccctttcaaagcgctcagcccccaaattcccaaccaacagccatttcagggaggggctacccaggaccaggcttttgatgaaccacgactgttcggggtgccgtcttgggagagccacgtcagtccctctgagattccaaacggccgacagcggacacctcgggaccacatccaagcctcggggacctgtcaagacgccatcgacggtcctggaccaaatcccgcccgggaagggaagggtcgcgaccggaccctggagacccacggctgcctggcgatctgagcccaccccggcgctgccgtcccgcccccacttccgatcggtcgaaggtcacgtgccctgaccccgccccgcagacgcgactcctccagctgcgagcgtcccggctttcccttccgccggaagtagggcgactttccttttccggctacgggtccccaagcggagcgggaggccggaccggggagccgagcggcggcgtcggcggcgtcggcggcggcggcgacggcggcgggggcggtaatggcggagctggtgcaggggcagagcgctcctgtggggatgaaggccgagggcttcgtggatgccctgcaccgggtccggcaggtacgggcgcagccggctggcaggagcacgagatcccgaggcggggcctggcgggcggggaagaggggttcgggcctggggggcgggaggcagcctgaaccgacgtctcagccgggccgggccgttccgtggagttcctacagccgggaggagccggggggataaggcgccactgcgaggcccaggcccggcctgtcgggcgggtctcccaggtgcctgaagtcgctgggaaagggtttgcttagagcgtctggccccatcgtgccccagcggccagcctggacccacagtgtagctagcgcggggttctgaacctcgcgaggggaggggtccgggaagcccacggggaggatctgggtgtagacataaagcagctgtctgacgcccagtagcttgttaaaacttggggaacatcgtctttagactttctgttgagtagaaggaactcgagggcatcttatatgtgagggtgctctttggagaggtgagagagggaggtgttacatgtgtgggggtggtccccaagatgtagaaatttctcatggcaagcttgcctctactggggagaatgatatggcctcattccgacattgaaactttactgtctgacaatgtcgtgcatttaatcaaagttaaattaactgggttttagaaggctccaggcttccccagagagtgaatatgggacctgccaaaaatacttactggcttctggcatggtacttagaacagaacgtgttcttcatttgtatctaaaacttacttacaagtcagccctaacacttcagcttcctcggttaagtgtcttatgtcctcctctcttcttatgtaattgtaagcgcactgatactttaaaagttgggctataactaattactgcttgattcctaacagaaagccacaggagtcattgtattagaagaaggtcttcactcgggcgcttgaagatatggtctttacatctctttccagtattccaggggagggaaccctacctgtttccctgataactgacttttcatgttatatattgatgctcctatagacattatattggatcccagaactttccaaacctgtggttccacctaaaattttatctgatgaattgttactttactgcctagctgccaaccagtacagtagtgagtatccatcttacttagacttcagatccacccatggctgtaatggatgaacatgccacccagctccccttccaccactctgcttgctggcgtgttacagtgctctcctctacagtacagggtcctgaaccttgtttctcactggctactaatatgtaatggctttcgctctgtgctgatgtgtgacagtcaccttgttggccttctatgtccgggaagaattatagtcactgccctaaagggctcagatcctcagtttgcagaaggcctgtagttgaacataaagtgaattttgaaccattgagaagacattccgcttctcttgagccagtggttgaactcatattcttggacaacctgctccagagggagaccctctggtaaatgctgacctaatgtggattgttgaagcagtggtgtttactactagcagtgaaaacttcattggaattgttctcagctctgaaatgcaccattgactggagcagtaataagcccaatggagacagggctgtaagtgtgttccttctgaatgttaacagctggaggtccatactatctccaaggatttgatggcctttaaaaactaaagaaaaaccaggttggtgggtaattttaggtttattgtatatagatttgcattgggcaagaacggaatgttagaaatctgtaatactgtatgctgatggtaaacttactgtaaggatctcatttgggtatctggaaggtgatagttctgtttctttgttatatacacagcatgttacagagatgtgatttttctccccattaaacagaactaaaagacagtatatttatttaaacgcaaagctttttccccttttatgtctcctcataaactccagagacagtctggaaggccctcttaaatttgtcaaagagcagtaaagtgtctcacgctcagtttttctagcagatcgtaatactctcagttgaccctgctgggatttgaacctgcagtttctattaagtttggtgtgtgaagtccaacaccttatcaactaggctttccctctgacatcttgaagcctccgtgtatatcctttggactctgcagcaaagtgcatcagttgttagtttactctgagcatggtattcttagattgaaaagaagtctctgaagatgtcaaataaaatgtaaacattttctccagcagtgtgaagtctagtgagttaatgtttggcacaagcaggtaatttacatccattctatagggtagtagaaatgtgatctgggcaagtcacagtggctcatgcttgtaatctcagcactttgggaggctgaggtaggaggatggcttgagctcaggggtttgataccagcctgggcaacatagcgagaccttgtctctactaaaaattaaaaaaattagctggatgtggtggcccacccctgcagtctcagctgtttgggaggctgaagcaagaggctagcttgagcatggagatcaaggctgcagtgagctgtgattgctccgctgcattccagcctgagtgacagagtgagacactgtctcaaaaaaaaaaaaagaaaaagaaaaagaaagaaatgtgatctcattcagttccatggatgaagatctaaaaactgctggatattaaaaaacatctgtctacttttcccaagtcattggctggttagcagaagtagtgtttcttcaactagttcagataagacaaaatcctgagtagttcatcctgttccacagccgtcctctgcacttctatactgactgtctgcctaggttacaaggggacctctggatgagtagatccaagtctggtttatgttgttccattctcctaaaaatatttttaaatgttcctagaaggtctaccattgataacttagtagcacctgtcatcacccgtgagcaatcccttgttaggagagtgtgatgccacagtgcattataggttgacagcagccttccacaagctggaccagctagctgtctgccagtcgtcgcctaaatagaaattgttctccgagaaactactaatactttttaggactttaaaaagcattagatctgttttgatctagatagacccactcaatgcctctggattgtataactacagcatataatgttgatacagaatgcagtctaaatggtgcttcatagagttcgttcggcatcacggtagcactacacttaaatgagtgtgaccaagccattgtagaatcagtagaaagtaaccttttgacagatttttaggcccgaacctcttcttcactggcacctattttggggaaatgttgattggtgtggggcctcagaagttccacagtcctcctgaaaatctctcccagtgctgctgtttcacagtttaagcctgagcagtaggtaatttgggatgtgtgttgtataccctgggctgatttagaactttaatgctttaagattctgacttcttagaacaagcactaggtttccttttaagagaacactgtacatctaccattaaaagaaaaagcctccattcattggccagtgggttcgccctgcgaggctcatttaacacatggttttgactcccggctcagtcaagtgtgctgaacactcaagagatctaagtggtactccactgagactgtcttgtacatgtccagtgattgaatagctcaagtcatcatttcacaagggactaactcctgcctgtacactcattttagctttcataaacacttgaaggaaactagtgtctgcaggaaatccacgggctgctcctgtagctttacattgttgggacccagtagagtacctggcggagtgagtcttccttaaagggttttggtgatgtcactgagtgtgtgtgcgccaccacatgttaatggaagtgctgaacttcatactgggtattggaaagtagatagtaaataaactatatattccactgtatgtctctaaggcttttctcatttgcagatgagaacatttataatgtgataatttatcatataatataattattttggggtagagacagggtctcactatgttgcccaggctggtctcgaactcctggcctcaagcaatcctcccacctcagtctttcaaagtgctgggatgggtgtgaggcaccgtgcccccatgcctggctgtctttattttaaaatctgatagcccatgtgtattaccaaactttggtttcttctgaagtaccagttatttcataaatagaaatttacttagaccacagttctcaaacttgtggcctgtgagctatagaagacttactatgggcctgcaggcatgctttgtttgacccacccagcaccaacacttaaaaactagagtgatttttggctgggcacggtggcttacacccgtaatcccagcactttgggaggccgaggtgggcggatcacttgaactcaggagttcgagaccagcctggtcaacgtggcaaaaccccatctctgctaaaaatacaaaaattagctgggtgtggtggcaggtgcctgtaatcccagctactcaggaagctgaggtgggagaatagcttgaacctgggaggcagaggttgcagtgagccgagatcgtgccattgcattcaagcctgagtgaaaagagcaaaactttgtctcaaaaaacaaaagaaactagagtgattttgcattaaaaaaaagagagagcaagatttcgggctgggcatggtggctaatgcctgtaatcccagcactttgggaggctgaggcaggtggatcacttgaggtcaggagtttgagaccagcctggccaacatggcaaaaccccgtctctactaaaaatacaaaaattagctgggcgtggtggcacatgtctgtaatcccagctactctggaggctgaggcaggagaattgcttaaacccaggaggtggaggttgcagtgagccgggatggtgccactgcactccagcctgggcaacagagcaagcctccatcccaaaaaaagtttcggtcaggcactgtggctcatgcctgtaatcccagcactttgggaggccgaggcagggagatcacttgaggtcaggatgagaccaacctggccaacatggtgaaaccctgcctccacttaaaatacaaaaatgagtcaggtgtggtggcacgcacctgtaatcccagctactcgagaggctgaaccacgataattgcttgaacctgggagacagaggttgcagtgagtggagattgcatcattgcactccagcctgggcgacaaagtgagactctgtctcaaaagaaaaaaaaagatttctggtttccctagaaaagatctggccacactgctcccacagcctgcacagcgataatcagcaggagctgagtagctgctgcgtttttgacatgaggcattcacactctccgggttgtcttcattcccgccatcttgctattgttttatactgttctttgggatgcctaattgacagttttttacttatctttttgtaaattgtgagtcagtcgcctctggtttttatttgaaatttctaatggaaagctctggattgagagttaggaggtctgagttgcctgtaagccgatgcatgaccttgggctgggttgggctttcctagcatttgatctataggctgtttaaagatcttccgtggaaaagagatcatgggcagttaagtttggggaatgcaggattaaataaaggtgaattggcttctttactgtaggacttctcagaacctttaacatgcttatgtgcattaactcctacagggtttagggtgtgtttcgtaaatgtcctgaagttagatcacttcgtgccctctttccatggaaccaaatcacattctgtgcatcaaacgtcaggaaatgtggagctagataatttcagcagtcccttcaaacccttagacattcagagcatccatctaactggatctggaaaaagctcaccatgttattttggttcttgtgctttcttatgttatgtctgctgtctattcatactcccttctctctccttttctgtgtagtctttattctgataactttatcttagaatcatcccaattgaaaatgttctgcatttggagttttattataaagattttgtttgttggttttgggttttcttgagacaaggtcttgttacgttgtccaggctggaatgcagtggcacgatcacagctcagtgcagcctggatctcctgggctcaagggatccttgcacctcagcctcccaagtagctggcatgcaccgccactcccagcctacatttttattctaataccagatggttacaaatcacttgcaagactgagtagtgtgattggaagtagtgatttgatttagattacttaccattaattgaagatctgctgagtccaaggccccttgctggatgctgggccagtgcaaagataagtaagacaagtttgtaagtggttttatcttattgcggaattcagtctttacaaccatcaggtaagataggaccagggctattaattctctctctctcttttttttgtaaattgagacaggatctctctgtgtcacccaggctggagcgcagtggcgcagtctcagctcactgcaacctctgcttctcgggctcaagcaatcctccttcctcagcctccccagtagctgccaccacacccagctaataagggctattaattctcattttatatttgaaaataatgagccagagggagataaagcagttttctcagaggtgcacatgggtaatatatgcagcagttcttggacccatgccctctgcattttaggaaggacttggttccttagcagaggtggttgggtggtttttcatctcaatgaggtggctgaagcagcaatctttttttttttttttttttcagacggagtctcgctctgtcacccaggctggagtgcagtgatgtgatctcagctcactgcaagctcagcctcccaggttcacaccattctcctgctcagcctcctgagtagctgggactacaggtgcctgccaccacacctggctgattttttgtatttttagtgaagacggggtttcaccgtgctagccagaatggtctcaaactcctgaccttgtgatccacctgcctcggcctcccaaagtgctaggattacaggcgtgagccactgcacccggcgttttttgttttttttttttgtttgtttgtttttttgagatggagtctcactctgtcaccaggctggaaggcagtggcatgatctcggctcactgcaacctccgcctcctgagttcaagtgattctcctgcctcagcctcccaagtagctgggactgcaggcgtgcaccatcacgcctagctaatttttgtattttctgtagagatgcggtttcaccatgttggccatgatggtctcaatctcctgacctcatgattcacctgccttggcctcccaaagtgctgggattacaggtgtgagccacccagcccagcctgtcagtctttaaacagatcactggaggattgttggtggaattcgatggaatggaaggggaaagccaatgggagtgtcacatttagggcctttggtgggagtgacccacctggaacagtatttcagcatagagcctcacctgatcatcttagcattctgcctacaagtgggcctctccatacccactttaaatgtagcaggtgtttaatgagcaccttctctgtgccaagcattttgctatgcattaggaaagttctttaactttttcagaacgtggacctttttgagactcttgaaactttgaaccactccctagaaatatttaaatagtttgggatgtaattttgggaagtcatgaattctctaaaactaaaccctggggctcctaattaaggactctttgtcttaagggtaccaagatgatggagacagatccagtcctcagctctcatagtggggagacagtgtaaccaacataacatactcggtgagagtatgctatttagatgtagtttgtaaggtgatctgctaacacaaatgtggcagtatttaattctgcctaagcataggagagatgaggttgtcaggaaaacctcccaagaagagctgcatcttattcaattgtcatagaattctttatttcaattattgcaagtaagcagggcaggatcagccggggccccatctctgatgacaacaatagttctcattcatcgagcccatgttgtgctgggtgccaggcaaggattcttatatatgttctttcatttgatggtcacaaaactcccggggagtggcattgtgatgtgattattaagagacaaacttgagcttcagacagtatgagttcaagttctggttctgccacttaactagtttggctttggacaagttatttaacttctttcagtcttagttttctcatctgtaatacagaaatagttgatgatagtaataattttaaaaacaatattgttagaaattaggaggttaccctggttggtggggtgggtagtgactgaagggggcatgaggcagacttctggggtcctggtgatgtttcttgatctaggtgctagttacataggtattttagtgtccgaaagttcagtgagctataaacttatgatccatgtatttttctgtgtcattgttctgcaataagaggttaaaatagcaagcatttctggttccttactgtgcacccggcattgtttctagtgctttacatttgttatcttgttatccctgtggatacaattccaggcaaactggttccaagtcccacggtaaggagaatagtagctactttagaaggtcactgtgacaattaaatgagggcactgtcaggcacttagtaggcagtatgtttgatgcactgtcttctttgtaacattaggtagtgggatgcaggactgggacctgcccctgcggcccatgactccaaacctgtcttaggaacttgttctttgccacagggctacttccctggctgcatactgtttcctcccactgtggggagtagagtcttgcagtccaacctacctttctcccaggcaggacctctctgggtggctgtgccgcgcaggctctggggaagcaagttgggtcccacaccctcgatgctggtgtgagccttcacctctgcttgctgtatccatgccaatcaacaggatccctgttgagtagcagggacacatatgtggatggcattcaggtggctttgcctgtttctaattggtatagagttctagtaagtatgaagttgtggggctatgtgcaactttttatttggatttataaggtgacctactttggttatgaaacttgtcagagaattttagtcttgaaaatgtgtactgggaataattaattgtcatgttttctaactttagtgatttgtgtaccacctttatgattttttccgtatcattgaaccttcaatacattatttaatattcttaaatttacattatttatttatttatttatttattttgagatggagtctcgctcttgtccccaggctggagtgcaatggctcgatctcggctcattgcaagctccacctcctgggttcaagcaattcttctgcctcagcctcctgagtagctgggattattggcatgcaccactatgcccagctaatttttgtatttttagtagagacggggtttcaccatgttggccaggctggtcttgaactcctgagctcaagtgatccaccagccttggcctcccaaagtgctgggattacaggcatgaacccctgcacccagccagatttattttaaatatgtatgtatgtgtgtgtatatatatatatatatatatatatatatatttttttttttttttttttttttaagagacagggtcttgtacctgcacaggctatggtgtggtggcttaaccatagctcactgtaactttgaactcctgggctcaagggatcctcctgcctcagcctcccaagaagctaaggctacaggctcacgccaccacactcagctaggtttttttgtttttgtttttgtagagataaagcctcactatgttgcccaggctgatgtcaaactttgggctcaaacgatcctcctaccccagccttccaagtgctgggattacagatatgagccaccacacccggcctatttaattttttttttttttttttttttttttttttgcctgtgacatacccccaaggagatcctgagaacacatgcccctaaaatgttttttaaaagggaactaagtcagtatcataagtggaaaactttgtcatgcatagaaggtaattgtgagaacaatggaactttaaaaacattcatccgtgtatctcccaagatcaccttgtgcatttttcttgggaaaacactggtttagtttgcctctgcattttacaggtgaagacaccaaggagcaaggctcttaaaggtcttgcccaaggtcacatgcgggaagaactggctggaaaatcaggactgttgactgattcctggtccagtgctctccttctctgagtttccactaactactggtagttaagtgtctgtgacgttgatttgtttttcatttatcactgtgcttaaaatagcatgggtagtgagataacccatttgcctccccctgaaaagggggaaaataacttgtgtggtagaaaattggtagcagagtcctctcagggtcacgcttgcagataaggaggagagtggccttggttttgtggaccatcctggcttttatctcctggcctacagcattatgaactgaggactgtacctcacttcccttaagtaactactgtttaaaatgatcaattatgtgaagaattgcttgggctctgtgcactggaagtcaggctttatttaagtccttgggaactgagatatgtttaagaaaatattaagtggagggaagggagcagccaagtggtcagagaattttagtcttgaaaatgtgcactgagaataattaattgaaaataggaaattaatgttttctaactttaatgatttgtgtacctcctttatggtttttgccatatcattgaatcttcgacataccatttacttggactccagagtcaggcagacctgggtttgaatactgtttctgccactttttatttttgtttttgtttgtttttgttttttttttggtaaactgaaagcaagtttattaagaaaggaataaaatagagcaggctgtttctgccgcttataagatgggtgactttgggcaggtcactccatgtctgagccccagtttttattgtcttaaaatggaaataataaggccgggcacggtggctcacgcctgtaatcccagcattttgggaggctgaggtgggcggatcacgagggcaggagtttgagaccagcctggccaacatggtgaaaccccatttctactaaaaatacaaaaattatccaggcatggtggcgcatgcctgtaaccccagctactcgggaggctgaggcaggagaatctcttgaatccaggaggcagaggttgcagtgagccaagaacctcctagagaatcatggtgaggaataaatgagatagcatatttaaagtggttttagcagagtagcacgcattacagtttaattctattaggcatttaaaatcattttttggaacaaggtagtatgtggaagaatgaaggagtatattgcttctttacagaataatgtaacatagcctacaccgtagtataaatgtaatttatacattgtaatgttgaactcatacccagcatttgtttaaccagggttcaaatgcagtttcctcacttcagagctgtatcccagctgttattctgtactactactctcatagtggaaatttcccaaattgtaggtaatgaagtgagcatgaattaagaagaaacctgaaaggctcagtcacattttggaagaacacttgttgatttaatctaaattaggaataggaagctgtcgaaacaacttttatcatggcggctttggaggaaaaaatgacatgaaactactacatacgttagaaggctggccaaggactcaggaatacagtttagctactttagaaggaagagaaaagggccaggcgcagtggcttacgcctgtaatctcagcactttgggaggccgaagcaggtggatcacctgaggtcaggagttcgagaccagcctgcccaacatggtgaaactccgtctctgctaaaaatataaaaatgagctaggcatggtggcacatacctggaatcccagctactcaagaggctgaggcaggagaattgcttgaacccaggagacggaggttgcagtgagccaagattgcgccaccgcactccagcctgggcaacagagcaagactccatctcaaaaataaaatgaggaaggtaaaagatctggaagcccagaggcatcatttaaagggaaccgggataatttcatatagagcttgtctttttgttttgttttgtttttgagtcaagagtctcactctgagatgagtgtggctgtgttctaacaaaactctaattacaaaggcaagtggttcaccagtggtagattgccaagccctggcctaggctacagtaatatctcctaaggctgagtctggcttagactatcttttccttccttccttcttcctatcttgtctcctagcagtcaaggggatcttgtttgttgttttctgttgttgttttaaagagatggggtctcgctccatcttccagctggagttcagtggctcgatcgtagctcactgtaacctcaaaccccggctcaagcagtcctcctgcctcagcctcctgagtagccgggactacaggaatgcaccaccacgcacagctacttttttattttttgtagagatgggggtcttgctgtgttgcccaggctggtctagaactcctggcctcaagcagtcatcccgctttgacctcccaaagtgctggagttacctttgctagccaccatgcttttggctggggtgttttagaagcagaaatcagcatgttactctcctgcttaagacttgcagtagctgcccatcagccttcctataaagtccaagctcctcaccatgacctgaaagggtccagtgtgaactacccacctttggaacatatctagttccttccatgctggcaagattgacttcttttccaggctcatacctaccaagcttgctcctgcctcagggtctttgtacaagttcctctgcctagaacatgctttctcaatttttatgtagccagctcctcatcatcacgtaggactcagatgtcactcctcacaatggcctgcccattcaccccatttaaagcagcttcctaagcacgctctgtgtgacattatcttctcttactgtggtaatgcttatcacctgctgaaatgatcagtttattgattacctggtttacctttaacttcccccagctgctgactcttaagtgccaggcctggtagttctccttcaccacaaaagctccagtgcctcaaaaagcccatcacacagtaggtacttaacatttgttgggtgaattgccttgttttacaaccctagtatttgtggtgtgttcaagtattcctccgccttcaggaatcttattatcttttcaaaaactatgaaatatatggtattaccctggggcatcatgcagagaggagggaggcttgcctcaacatcacagaactcgtaaatgtaagggatgatgtctgctgtttaaatcctgtatttggttttcagtatcatgattgtctttggttgtttatttgtttcaggtaatttctgttggtcccaataggtgtgagacttctgggaacatttggactagctcagaactaccactgaagactttgctctggggcacagctgtgctagctgcccccaatagacccctgtttattaactttaactgagggactaacatcaagagcagttgctgtaaatattcctttggttaaatgaaagagttgctttattatgaagatcacatataatttcctgctgagaacaaagtagataagtaagaagttctgcataccatttgtttctggggggaaatttttaacagctatgttctgtcctttcactgataataaatattaaaagttgaaatagctcttagaggtcatctccctttctctgctgcaggaatccttctgagattgtctggacacttccagtaaagacaagcttatgttacatctctttagatcacacatcagtttatagacattaaagtttataggatgggtgtattcctaaagaattgtcaggctgggtaccatgactcacacctttgagccatgggattagccaaagtgctaattccagcactttgcgagactgaggcaggaggattgcttgagctcaggagttcgagaccagcctgggcaacatattgagtcctcatctctattaaaaattaaaaaaataggccaggcgctgtggctcatgcttgtaatcccagcactttgggaggccgaggcaggcagatcacctgaggtcaggagttcgagaccagcctggccaacgtggtgaaatcctgtctctactaaaaatacaaaaattagccgggcgtggtggtgcatgcctgtaatcccagctactcaggaggctgaggcaggagaatcgcttgaacccaggaggcagaggttacagtgagctgagatcgtgccattgcactccagcctgggcaacaagagcaaaactccatatcaaaaaaaataataaattttaaaaaatttagctggacgtggtggtgcgtacttgtagtctcagctgcttgggaggctgaggcgggaggatgacttgagcttggaaaattgagggtacagtgaacaatgatcacatcactgcactccagcctggatgacagagtgagacccgtttgtcacatttgagcacatgaggcctttcaaatattcttggggaatttgttgcataagcgaaccctgtgagaaaagttaaactttttgaagaaagttcttcaattgttggcttgcttttttttttttttttttcttcttaagatgggatgtgcctatatattaagtggtgacttaaaaatactaatttgcggccgggcgcagtggctcacgcctataatcccagcactttgagaggccaaggggggcagatcacccgaggttgggcgttcgaggccagcctgaccaacatggagaaaccctgtctctactgaaaatacaaaattagctgggcgtggtggcgcatgcctgtaatcccagctacttgggaagtcgagacaggagaatcgcttgaacccgggaggcaaaggttgcggtgagccaagatcatgccattgcactccagcctgggcaacaagagcgaaactccgtctcaaaaaaaaaaaaaaaaaaaggatactaattttctggtagagacacatttttgaaagtactaaagacaagttattattaagaccaaaagaaaactcacttaacagtgaaaagtatttgtgctcttgcggtgctgccttccattaatcaaggtcaggggagaaatgggataatagccctttaaagaggacacttgtctttctccctcagatagagccatggtttgttactgagtgtttaaatctgattctctctgtagattgctgctaaaattgattcaattcctcacttgaataattccacacctctagtggacccctcagtatatggatacggagtacaaaaacggcccttggatgatggaggtaagttgccagaaatatctttgcctttcaggtggtagtgaacctgccagttaagtttgaatttgtcagccattaccttaacgactctctgaagtgtcactctgttgagaagaaaggttgaagggaagtatttaggatgatttttctcagcagttcttcagcatttgagttcctatttgccttgataatacagaaatcttttcgctgggctctgagataaagacttggcccctgagcatcagcttggaagtaatttgacctatttgagaattttgtttgatttagcctaactcccttcttcagtgcgcatgggaattgaagttcccactttctccacagaaaagctacgatttggtgcatggctctagggaagctgtggctacatcttgaccttaaagaaagagaagaatggtgacctttctgcagtctagctgccagctttttcaccattcccatttatgtcaggctttttctagaagcatcccttttctttaattcgtttatttgttgttttgttggctggtttatataccctactccatcccaaaaagaatttgagaacacttagaagtgccaatccccagcactctggcagagtatctatcagatgtgtttctgtagagagcttggacatctttatcatattttgtctcctgttactatagaagagatagtgaagtacactagattgacatgaatttgcatgtagtcgagtgagtcggtgtcttctctgtgttctttttctgtcgctatgtacccaatcatttatgtttgtacatatttctgtgatgtattattatgtgaaaaatgaagatgtagaacagtatgtattatataatcttttctcccaaaagtgcatatttttatatacatagaaaaatataatttgccatgactcatttctctggtctctaggaattcttgtttttttttttaatccctccttagcgatgggatcacactctgctcaggctagagtgcagtggcgccgttgaactcctgggctcgagtgatcctcccacctcggcttcccaagtagctgggactacaggcatgagccaccatgcctcctagtacgtttttaaatcctccagttcatagacttgtttgcaaatctcaatgtcctgaataaaccctatgttaaggttctttttagttaacttaagagttgaagtattttattttatttgtaatttttgtgagtgcataggtgtatatatttatggggtacatgagatgttttgatgcaggcctgcaatgtgaaataagcacctcgtggaaaacgggggtatccatcccctcaagcatttatcttttgagttacaaacaatccagttactctctttattttaaaatgtacaattaagttattgttggctatagtcaccctgttgtgctatcaaatagtaggtcttattcgtacccattaacccccctcccccctgagtccccttagccccctactacccttcccagcctctggtaaccatccttctactctctatgtccatgagttcaactgttttgatttttatattgcataaataagtgagaacatgtaatttttgtctttctccgcctggcttatttcacttaacataatgatctccagctccatccatgttgttgcaaatgactggatctcattcttttttatggctgagttgaagtgtttttaaatagacccaaataacacctccaaaaagttctagaggactgaactttaacctcgtaaaggttaaccctgcttcaagggaaagttagaaagttcatgttgctaaagaagtgatctggtagcctctgtcaaagaaaacccaagccaaaccaaacaaacagctacacagcctttggaaatctttattgctaagaaaaatgtgccagaattccggccgcttggtctgcctctgcttttctaaacttttcatcacgccatcagcaagactgtgagcctagaaggtggccaggtaaacatgaacatcacttcccttcacaggatctgcttattcacattctttgtctcttaagagagtggcccagtgaccttacccctaccagaagacaactgacaaaaaggggctgtggcagtccccagacgctgagatcaacacagaactcaaattctacacgtggagaacagcttggagaaaaaaacaatatgtgtaatcctgttatttaaacagtgctcaacagaagacacgattaattttatcgagctgtaatacagaatgtaagaagcctgagggaaattccttgttcttcaaatacagcctgttgttacctaagaccgggtgttcagggaggatgagagattcagcacgacacagaaactttccttcttgctataggagggcttcatatttagagggaagaaaaagataaaccatggtcattttctgtttgtgaagacttattccccaaaaggtagacatggaaaaaaatatggttatcaaaacaagtaagtgaaaatacgcaatataaatgaacccgaggttttaagtgagattctggacctactgggtgatctttggccaagtcagctaacatctgcctgtgacccagttctctttatcaatactgataatctctttattagtgctaatttctttcaaatgtatgtgcaatggactaatgggagaaaaatgtctgcaaaatgctagagggtttcatttgcaaatatttaggtattccttatgcagaggacgcagcagatacctgctcactgcaagcacaagttttaacccttcagcgccaggcagtgggtgaaaaaaacaaggctgaattgtgaaattgttgtgaaaggctgaatgagttgtgaaatatattgatctcaatttctggaaacactgggccaaagagacactgtccgttagtgaggtgtgtgcacagaggcagacaacttagttttgtttttacgttgctgtctcaagaggaaccaaagtatgattgcctcgaaaaggtaaagaggttactttgcattacagctttctgctaaggcaaaaatgcagttaatgcaatcatccctatttggcctagggaatcactaacaccagtcaaatataaaaagatcacagcgtactattttggataagtagtttaaatggttatcttagttccagtggccctggggtggattttctgttttgtggtcataaacactttgtaaatacacacgaatttttacaatcaagtgagtgccatccccttaaaatcttcagtgtgagtctaaagaattttcccccaaaggctcccacatctaaaaacagtggccatctcctcttagaattcctagagatgcccagcatggtggctcacacctgtaatcccagctacccaggaggctgaggtggtgggaaagcttgagcccagacattcgaggccagcctgggcaacatagcaaaaccgtatttccgaaaaataaataaggccgggcactgtggctcacgcctgtaatcccagcactttgggaggccaaggcaggcaaatcacgaggtcaggagattgagaccatcctggctgacacggtgaaaccccgtctctactaaaaatacaaaaaattagctggatgtcatggcacgcgcctgtagtcccagctgcttgggaggctgaggcaggagaatcacttgaacctgggagacggaggttgcagtgagccaagatcgcaccactgcactccagcctgggcaacagagtgagactccatctcaaaaaatacatatatacatatatagatacacatatatacacacatatatacacatatatataagtatatgtgtgtgtgtgtgtgtgtgtgtgtatatatatatatatgtaaagttttttttaatatgctaggcagtggaacaagggaaaggatttgttcctgatatagaaagggatttgggttagttgtgtttcagagagtggcagttttgagccacttgtcagaacgctgttcatgagtctgcttagaacccagagcagaatttagagctcagtttgaaagcttgcctgaatgcctgtccgtgggaagagcagtcaccagtcactccaccgccctccagctttggatcaggccattttaaccttcactgtcttcaatcttgatacccacatgttccagcagtctttgatatgcatccttggcaccccaccagttcaggaatctgccttctggtctcagttgtggcacctttttcatccagtacttctctcatgtttcaactggagcctctccctgcagtcagtccaaccagtttcattcctccagtaaccagggaggtgcagatcttgcaacctggccattgcctgccctcccgcttggctcctcccgtgcacctcctgtgctcctcctgtgtagcagcctggctgcctgtctcctctctcccctcacccagctcttaacctgcccaactcctgctcagccaacttcttcctagaaacctgtcctcttccttatcttttgactttcttcggggctcagcccacatgccacctagcctcttggtcttctctctaccttttccttccttcctccctccctccctccctccctccctctttccccctcttttccctttttcacacacccacctgaccagtgaatattaagtcatatccttctctgaatttctaaagcagtgtatttgccctctgctcagggcagaccttccttccgcggttactgggtcccgctgtgcacctctcctagcagagcctacgtgatgtggccataaagactggcttcatttcccatggactcttcatgctcaagttctcccatgtttttcatgctcaagttctcccgtgtttcctacgatttgcatttttaaattttgggaaaagtaagttccaaatttaagacaatagtattagctaagtgatttagaagtgcgaatttaaatgtaatctaaattagaggttggcaagcttttctttcttttttttaaagacagggtctcactcttgctgaggctggagtgcagtggggcagtcatggttcactgcagcctctatcccccaggctcaggtgatcctcccacctcagcctcctgggtagctgggactgcactgcacctggcaacaagcttttttataaaggacctgatagtaagcattttaggggccaggcatggtggcttatgcctataatcccagcactttgggaggccgaggtgggaggattgcttgcgtccaggagtttgagaccagcctgggcaatatagcaagaccccatctctacaaaaaaatgaaagaagattagctgggtgtggtggtgcatgcctgcagccccagctactcaggaggctgaggtgggaggattgcctgagcctgggaggtcaagaccacagtaagcagtgatcgcaccactgcactccgcttgggtgacatagtgatctcagaacaaacaaaaataaatttaagcttgcaggctatgtatcccacctactaagctacgctattggagttcaaaaacagctgtagcatctacataaacaaagagcatggctgtgagccaataagatatttcaccgaaacaggcagctggccctcaagcttaatttgccagccctcaactaaaatcagcctcatcagttgatgaaaacattttcttcatctttagttagggaagtatatagagagtacccctcccccagtttctttaaacaagtctcccgtctcatggttcactgtccaactgccctaaccacctgaaacaagtgctttctcatgtttgcccagagctgatggacagacagagaagtcacttcccatttgtccctctgtatctctcctgatcaaagatcaaagcctttccagttttcttcctcaggagcatttttaggagcttttttagttgaactaagcaggcctcatactccccctgcattctgtgtagtgggtggcaccaaaaccaggacttcaggagagtacagcactgtcctcaccactggggtggcgggggtaaggccatgcaaggggctttgaaactatgcctgcctcttcactcaaagactcgtctttgctatttatgtagcacctttttttttgtcctttttattctttttacttcatgacctgctgaagaacagcaccttttatagtaccacactttctacttttgataatacagttgttccccatttattcatgacttcgttttccacggtttcagttacccacggtcaaccactgccgaaattattaaatggaaattttagaaataattcctaattttttttttttttttttgagatggagtcttgctctgtcacccaggctggagtgtagtggtgcgatcttggctcactgcaacctctgcctcccaggttcaagtgattctcctgcctcagcctcccaattagctgggattacaggcgtgcgccaccacaactagctaatttttgtatttttagtagagatggggtttcaccatgttggccaggctggtcttgaactcctgacctcgtgatccacctgcctcggcctcccagagggctgggattacaggcgtgagccaccgcacccagccaattcctaatttttaaattgtacaccattctgagtagcatgtgtatccacactgtatacactacccactcaccaatgtataggaaaaaatgtagcgtatacagggttcggtactctccatggcttcagccacctaccaggggtcttggaacatatccctcatggatgagggggaactgctgtattcttacggggtaaaggacgaattcttgggcgttctgtcaaatgaattatttgcaggaagagtgaaatagactatttctgtgatcctttccaagctttgtttcagtacttgtggcatagggcaaggacagaaaaggaagacaggagggaggaaaagacgtttgaaaatcccagacctcaaggagagacaggagataggaggtacaagtgctagcggtggtgagagccatgatgcccggacccctgcctgtgacctgcaccccaggcaggtgctgaggccaccagtctccactctggaaagagggaagtgaatctcagaagtgttgatactttccctgaatgggggatgatgacagatattggagggatgaaaagccaagaccaaaacctagttcctgagagtaggaggggttaggaggaaggtttgccttttgtgaagagggaagaggtaaagtgaggctgggatgtggttgggcagtcatcatcaagggcagatgaaggctttccaggggcggtggacatgggcaggcttcccaggttcctttttcagctccttacctcctgtctgccctcttccctaaaatgggcctttctgagagtcacgtctgcccctgaaggttatgcccttcctgccacgccccttctcccgttccccacttttggtgtacagtgggcggtcacctggggtggaaaaatccccaagcagtggggccaggcaagaattctgaatggagaatcccaaggtaacaaagggtagagccttggtaagaaacagtgaagggaggctgggcatggtagctcacgcctgtaatcccagcactttgggaggctgaagcgggaggatcacctgaggtcaagagttcaagaccagcctggccaacatggtaaaacccagtctctactaaaaatacaaaaattagctggatgtggtggcgtgcacctgtagtcccagctcttcgggaggctgaggtgggagaatggcctgaacccgggaggcagaggttgcagtgagctgaaaccgtgtcactgcactccagcctgggcgacagagcaagactctgtctccaaaaaaaaaaaaaaaaaaaaacaaatagtgaaggggacagggtctgattttatccagttgacaactcctggcacaggctctgtgccctacccccctacctcagccacctgcatttgtttcttcctccctcccttcacccatctatgcattttaggattataattcagaagtgagatgatactcacatgggtacatacatatgtgtaagttggaaaaaggcagtgagatttttccccttggcaaagcatcatgtgactggttggtggacagttggcttagccagctaggtaaaatagtattcattttccacaaaaatgaatgagctaaacctgcagcatcaatgttgtgacaaaaatataactcgagctcatgtacaatgcctgttacattcttcgcagctgttaatagggaagaaaagtagttgccaaattaaaagaggattcataggtttccagagttcaacttgatggtagaacctctctcgaatacagtttgggagtgtcacaaaactaaacatgcacttacgcacagtccacaactgcactgttgggcatttatccccaagaaaggaaaatgttcacacaagagcctgttcacatagcagctttattcataatagtcccaaactgaaaacagcccacgtgtccttcaactgatgaatggttctgcttgcgatacagccataccgtggaatatcactcagcggtaaaacggaacaaatgctgagtacatccagcaacttggatcaatctccagggaattatgccgagtgccagaaaccaatcccaaaaaactacatactgcatgatcccctttatgtaaccttttgggaacggagaacagattagtggttgccagtggttagggattgagtcggaggagagggggtcacctaagatcacagctagaagggaacctgaagcttaaactccttattgttgtagataaggaaaccagtgtctctgaagaagtaagtggtttgaccaaggccagatagatacatgataagtgacagaagggaggttgaacctgggtctctgtctcatgtgccataatagtatagtacttaaacatgtggacttcagagtctgacagatcaaggtttgaatcccagctttgctagtcattagctgtttgaccttgggcaagttccttaacgtctctgagcctgtgtttcctcatctgtacaatggacctgatgatacctgcctcatcagattatcatgagggttatatcatgttattttcaagctttaagaaatactactcccgggcctggcatggttgctcatgcttgtaatcccctttgggaggccaaggcagacagatcaacgaggtcaggagattgaaaccatcctggccaacaaggtgaaaccccgcctctattaaaatacaaaaaaattagctgggcatggtggtgcgcgcctttagtcccagctactcgggaggctgaggcaggggaatcacttgaacccaggaggtggagattgcagtgagccgagatcgtgccactgcactccagcctggcgacagagcaagactctgtctcaaacaaaaaaaaaaaaaaagaaagaaataccactcccaatgtgagaaaaactgtttccatcagaactagttagtacagacatattaaaacacatatgtgactgaaatgaaagttttatgaaatacattacccttattatatatggtacattctgttttctatttcatttttattaataaagctggttgtgaccccctatattgatttcatgacactggcgtaaatgaaagtaaagcttagggctatgaatatactatcatagaattctttttcctcttaggctcttgaggagaaggtgcagggcccaacacgtccctggaggctagggtaggccccctcatctgttgccttctgccttccctgctagactgtaagctccctgagggcaaaggtggctttgttgactgttgtatcctcaggtcctgtcacagtgctcagcacctggaaggcgctgacttgtgagatgaagaatgatcaagagagttaatagcacaaaattaaacagtgataagtgttgaaacccacaaaattaaaggacaggggaagatgaaggggtacagagtttgcatgggcacaggcccctcgcctgcatgccactctgagggcttgggtgcagtgtgatcgcaccttcctcttcagtaagatgggaatggcagtgacagtagctgcctcaaaggtgggttcttgtaggaccaagtgggttcacgcaggtgaggtgcccaggaaagcacctagtgtggctgggggtggtggtctttccactcacagaagcttacagtagactacaagtaagagtgatgtgattggctgggcacggtggctcacacctgtaatcccagcactttgggaggccaaggcaggcggatcacctgatgtcaggagtttgagaccagcttggccaacatggtaaaaccccatctctactaaaagtacaaaaattagccaggcatggcggcacacacctgtaatcctggctacttggtaggctgaagcaggagaatcgcacgaacccgggaggcggaggttgcagtgagccgagatcgcgccgctgcactccagcctgggagacagagcgagactctgtctcaaacaacaacaacaacaaaaaagagtgacattattgagataaacttgaatttactttcactttttaaaaaataatttgcaaaattaataaattatgcttgccaaaggactttcagctgaactcagcatgtcagtgttttgtggccctggagcaagagttgctgcctagaacacaggaagcctttgtagtgtccctgggggaaaagctttctaaaaacgccctgaatcctcaccgctaagtgtgtgttactgacctgagctggggtgtggaaagccattggtcagtcagaggagactgcaaatccaaagaagaggcagaggaggggggattgttttcaaaatctaaaaaggaagatttgggttatttgtttttacagttataaaaactggtattcctctctccccacccccccccaacagactcactcacctgcctctggccagtggttccgtgtgggtgccagcccgtgctggctgtgctgtcgtgaaggaggaattggcatttttgttccttgtgctggggtgggagtgggggtataactattaaagctgatgtggccgggcgcggtggctcacgcctgtaatcccagcactttgggaggctaaagtgggcggatcacctgaggtcgggagttcgagaccagcctgaccaacatggagaaaccccgtctctactaaaaatacaaaattagccgggcgtagtggcgcatgcctgtaatcccagctactcgggaagctgaggtaggagaatcgcttgaacccaggaggcagaggttgtggtaagccgagatcacgcctttgcactccagcctgggcaagaagagcgagactctgtctcaggaaaaaaaaaaagctgatgtgtattgcaaagttgcatgtatttcccagtgcagttttgtttcttttggaggagaaaaaaaaaatgaaatctttttttcttcactaatagggaaaaatgtgtctgatcacctttttttgtgttattgtttgtttgattgattgatttttaagattgttctgctctgtcacccaggctggagtgcaatgacacgatcccagctccctgcaacttccacctccccggttcattgtgcatcagcctcccgagtagctgggattacagatgtgcaccaccacacccagctaatttgtgtattttttttttttttactagagacagggttttgccatgttggccaggcaggtctcgaactcctggcctcaagttatctgcctgccttggcctcccaaagtgctgggattacaggcatgagtgacagcacctgacctgacctcctttttttttttttttaagattattattaaaattggcagagtattactcttcagaaagaatttatgatatcgtaggatgactcacagcccaggcagttcgtattatatagtgcacaagggaaacgagaactacacctgtatatgctggaattgctccaacgggacctttagaagcaagaagatgcattgtcaaccagcacacaccattagtggaaacaggactgattttacccagcatttttccttttttacaggaaaatgagtgtagttccattcaattgaatatgataggtgttcccatctgcctccttagtgtgacccctcctcattgcgaagactgaggagaggttcctgttcctggagttggacatagaagttggccatatgagtacccagcgcccctgatctaactgctggttttcatttttaggcagcaaatgggaatgttccgaagggaatgaaactgcaatcacatgtttcagccttgggtggactccagcatttgcatggaggagggagatgatttatccttcctaagcatctgccagctcagagttgactctggacttgaacctgatttcctctcagtgatgcggctctcagcagcccatctatctgtgggatgatagtgtgaacattttcatctctggtcattatgagtgcctccaccgtggctggcaggaatggtgtcatgtgcgtggcacctgtaacacatactttgccaacaaaaaggaattgccatttttgtgatgagcacaaaatttcaaatggcttttgaacaggagccctctgaatattcttgtgaatctcaggaagttctttatggtagcactgccctttgtttctgtggcttttctggctgagacagaaatttctgaagatcatcggccctttgacatcctttaccaaacaacgcagtggaccagaacccacggtgcggcctcattcccccagctgaggaatgctgagcacctctcctctgtgttctcatcatttcaagacattttagttcttctggcttcagtagattctttacccactaagaggggaattctgatagcaatcagggaagctgagcttgacccataaataggaacagctaaccaagctcacaggtactctgtcgttgacattctcctttggtgtgtttcttttcctccccactgccctatgtggccaacatacctccctcaggaatgtctcagccccaacattattcaggggctgagtctgtggtgaggatttctttcctgacctggtgattgtccagttttcatgcagaatgggagttgtgaacactacctgttccaagcaagaatgtttgttatattcaaacagataggcaaagagaaaattttaagagtcagtaaaaaacaattctcttatccctgagataagcagattaatagtgtctagtgtcaatattttggctgtagaccattatcttgttattgatccagaagaaatatggtattgacttagtagcttcgtttgctttttgctagcattgttttgctttgctttttcttctttttaaatgtcacggtctgctttttttcctttgtctctttactgtccagtcggagaatgacagcagtgagtttgagcacaagcagagcagttggctccctgttctgattcagatggagttcaattgtcaaaccatttcattctctgtcctcaagtgggtgtaatcgatcctttgcgacttagctcatgtccttagaataactttccccaaagacgtatttctgaatgccctttttagcatgttgtaaggtgcatttggttctttgtgatatgtttaggatttgtattttttcattgtctgctgactgtgtttcctgagctgcattttccaaaagagaaacactacagaatcatttttgctgatggctggtgaaggagagacactcatcaatagctgaaagaggagaaactggaacaaaaagtgtagctaaagtggttttgtgggaatgtgattacagagttggttttaataataagaggctgtttggcaccgttgtctttgtgaaatgggcttgaaaggcagttgctcattcttagtgtccgctgcacatggactgctctggtgggtccgtgacgaggcctgtggaggtaggaggctggatcctctccttcagatgcttatggtcttgggggtgggggggccggcgaggggggcaccagggggcgtctcctcccccgtggccaggaggagcatatgtgcgtgttcctcatgactacagctgctgtggagcagtccttaacaatgcatccaaggagggtaaatcttctcatttgtttttaaaagagaaagaaggatctctttccatctttacattgagtttggatccagagcaggagggaggtaggaagttagagggatttaggctagcaggattttctcccaggcctcacagcatgtggacacacagatcaatttcttatcctgtgttcagctggacactgggttacagactgtgttgatcaagatgtcccctcctgtttcatatcatataacgcattcatttcagccactgagcctaaattactgtttgctttctttctgcctttcttttccaccccacccgaaatggtaagaatggtaaggatgaagttagtttatccgtgctaatgctttgattttttttttctctttctctttgccacagtaggtaaccagttaggggccttggtacatcaaaggtaagcagtgggttacgttttattatttattgatcatttctaattgtttattgatccaccatctgtactagagtgctagaaagtcagaggttgagaatgtgaaaaagcatgggttaggcttctttaagactcgagttttttgctagccatttctaagatagtgtcagctcagggataaactaatacaaggcattaaaaatcagccattattgcagtaacttaaaatacttgtagaagattggagttgctctttctaccaatgtacatttaatttaaaaggagagaatgagattttcccacctggttttgtggtgttgccagtattttattaatccttaaccccttcacctgagaagagacacctcgaagtgtgagggtcagacactcacaagagaatgctttgggtgcccagggagtatgggtgggtggctagtgcgtggtgaggaggccagaagccagggttccatccttccgaagtggtagggacttgccagagagcctcagcccagctaattctctgtttctgtgtcccctcatagccttctgtcaaacgtagaagatttagagagatacagaaagagccctgagttttacaaaggccaatctgtaagatggggtatgtgtggtcatagtgtatcgcccttcaaacagggaaaaatatacaagaaactgccacagtttctcttctggaaggatgaattttgtgctatgtatctgttgctgtaacatatccttaaccttctatcagcaaaacaattctgtcatcttgtattctgcctaggtgtttgggagtttctagaaatcaccggtcatcagttaaacaaaagttttatcctggggtttttttggtggttgttgttattgttgtttctttgtttgctttgttttgtttgttgatgaactgaaaaatttaaatgaggtgatcgttagtatcaaatgctgactttcctataaagccataactagtcaggattttcttttccaaggtgtttatattttgtaccttggacaagtttcagccttgcatttagattagaacgttttcttcctggaaacccagagcagttcgtcttggaatgtttcttcctcacagttggctaaagtgttccttagggccaagggctgcctgggcttcgtgacattttgtattgcagtagtgttgaagcccctctagtcaattcccaggtaatattttctgagagtagacagaatagacagctcatgctacacatggtgtgagcagcagcctcctggccacacgcacaagagccctgtcatccctcataacaaggtcaggaagcacatcctgacagggacctggcttctgctgcaggacgtgttgggacagcagggcttggcattcacatccatggtgttactgattaggaagctgggaatgaattgcctgatttggggagaacacatacatcgcaagaggtggagagaatcccgtcttgttcataagcttgagggtgtaaactccctcaaggagggagggagaagactgtttgttcccatcaaaatgatacagtggcaagtgctatttatgctattgcatttcttttaagtgatgcactttccctaaaaatatgcacttattcaatcctttctgtgatgggtaaaaacccagctgtgtgagagatgtttaaaaatgcttgccttttttttttttttaaactacttgcatttagcatcctcccaaggtaaatgttgagatttaattgctttctggggtgttgggcaaattggacattgtccacaatacactttatggcagatttgaaggtttgttgaaaaaagccagtgcagtagtagtttaaaaaaaaaaaaggcacataatggatgggatagcatttaacagaagtaccttgcagagtaagtgaggtaattattctgttctggtcaacagtgattacgcctccatcggatactggttccatttggggcgtctcaccgttaaaaacatccataaattagaagggaggccagaaaacaataaaaagattgggaaacaagggatgttgaagaaaagatggatatctcttcatctagagaggactccacaatagaagtctaaacatctcccaaaaccctggaggacctttcagtgacctgggattgatggcccattggttagagagcacctaaccaggcagaatgaggcaacactgagaggtgctgtatgaagaaaaggcagctgttagaggaggtgatggtttcatgaaaaccctgaggtttcttcctctgacaaaaggagatgaaaggcttagatctttggaaggagtgattgaccagacggttcattacgtgacactctttgtaggtggtggtggatttgttggccaaattggcctgatgtattttaagcttttatcatgcaacattgccagtatgggcagtttggggacctaaaatggctgcaaaagtctgtattctgtatttttttccaaaatgttctttgtttttaggacggtaataacggaagaattcaaagtgcctgacaaaatggttggatttagtaagtatccatgttgtctactttttccctgattcctgtctcttctttttctctctttttttctgagctgctttgccaggatgttctttttgttttaatctctcttgtgagtatcacctgtagtagaatgctttgcacatgccattccccacagctctgaaatgctgcaggtctcttcaggctgagggagaaaccagagcactggactgtggatgtccctcccttccccacctctccccacctcagctcagatcccctctgcctgtaggctgtttcacaagggctttctgctgccatcatgcccaaagagtggagatgggctcacgggggccaactcgatgtgtagtattgtgagccaagtgtcacagtttgtggaattaattcagtcattcctgcgtggtgaaatatggaataggggcgtgtattctgaccctgttcaatttgtttcagttatcggcaggggaggtgagcagatttcacggattcaagcagaatctggttgcaaaattcagattgcttcaggtaagggctttttaaaaatagatatcaattttgtagaaatcagtattttgcaaaactttccagattcggtactttgcttgttgcttgggtaagtatatgcgattagtgttttccttgcactttgggagttggactcctaaatgagaaccagaaggatcagagcaaaggtgggcccggagataaggcctcctatctggcttctggggtaaaccctccctcagctctgtggccagacatggccccttcccaaacacctgccactctaggacctatgttttctgcaccagaatgttatgccagacatagtggcatagtggggcctgtaggaatcctatggctttggggtcactccttgactacatgcatcaggggaggctcccatggatgagactgtcccttccctttgtgggaagaggatagctgggggtcctggctgaattagcactcactgaacatgttttatgacctttcctagctgggtccattttgaccatgcaacatggagagagatggagtgaagaacaattttttattttatttatggttttgtcatctaatttgagcttgacctctttccattgcaaaggaaggggtttgaaggacatttgactagaaaaatgtccttttaaaagatacttattacagtgtcttgaaggcagtaagtcctgttagctatttctctttcattttttttgaggaaggattttaagaagcaaattttttcaggaacaaaatgaggcatcacatgtggtgttagaaagtaacgtgtttctctcattaaatggcccagttccacatagatgtcactgatctcttgggacattcatgcagtaactggtatggtcctgatgtgcgtgtcatgaagttccttcctagagtactagtttacttgccgtgtgcagacaaatgaccattaaactacaaatggagaaactgaggaatagcacgataaagtgactgaaacaattactagcatgtgagtgggtcagaagtgaagctgagatgggtaatcaggaccaactcacagacctctgtcacgtccttctagcttcccctgtgggacttgtttctacttcgagaatctagggtggagctaccagcttaatattctgtccacaagtggaagcaaactgtctttttctgggagcctgggcctctgcagggctggcgtaggaagcagccctagagagccttacagaggcagaggtgcatgtgcccggtgcccaccaacacccctcatcttcttgattcttcttatagagagttctgggattccagagaggccctgtgtacttaccggaaccccagaaagtattgagtaagtttattttatttactttttctttcactcttcttcctccttccccaaatggggagaaatggaagggcaacactgttactgaacactgagtctgtgctgcagtctggccacacaggtagataattccataggaaaaaaatctgggaggttactgtgccaggggtttttgttaccttaaatacacgagatatcacatttgttctaaaccccacagctgtcataacatctacttcaaaccagggtctcaggagtgtacattcaccccacctgaatgctctaatcaacttacttcttccttgttaacacctcctttacctgagcaggtctggattagtaagccagtcacttggtgagctactgagaatcctggtaccaggacttttggctggaggctgatcccgttacccttctgatatttgtgaaccaaatgaatcaactcttcgtgactttgctctactcagagggccgtacggactggccagaggatgtcttgacttttggcgcccttgcaacagtcttaagactaacattgctttcctaccctgttactcacatactcagaaccttataccaggtgcaggtgtcataaatccaagaatctcctgggaaagggaaacatactgacttagagcctgctcactgtccttcaatctacggagcagcactgcatttggggacaggggtgctaagattatatctgactcaataggtagggttgttttattgtttccatttctcagggagtctagatgagcttaaagtctcttgttctgccatcacattgcaagcagtgaaccataataaatatcgctggcaggtgtgcattacagggcaactggatggtttgctggagtcaaagcatttttcttccaacacaggttaatctagtacacaggcaaaatattaaaaagctgctgtaactgggaagatacacgaagctgattctgtacacaaaggctcaagactacaaaaggcaacatctatttcctgcctttctcttctttcttcctactcttctaaccattcctgcttcctgtctacccaaggagcagaggcagtgggattataactttaggaggaaacaaatttcattgtcttcagtgagcagcacagctagcctgtttagtagctgaattcttctccattagagaaaccaaaaagcagattgtgtgtggcaatttagagaatcaatacgagaaataacaaccaggagaaattctggtgcagaaaaggaaattggcacagcagatgactttggtggtctgggctgtgctgtcacaacattgcagttgccctctcccgctgcccaagaaaccaacacaaatagcaggacacgtgacacgcagggtcccaacttggctgccatggaaagcccaaagcaggtgtctgtgagtgcacagctgcatccagcaccgcctccccctttcccacctcttggaaccaaactgggattcatagccttagcttaaaagtcatagagcagtgttgttggttatgaagaagaagcgtggagtatgggagttcagacagtgagtactaatccttgcttgctttcttcccatctttctcattgctggctctctctcctgcctgcatttatttaacaaatgtatatattgagtctactctgtgagaagggtcatgttggatgggggaacagagagatgtaaagggatgaaagatggtctctgcctccagagcagctggcatcctaataggagacgacacctttgtggagacacaagcatgagcagagggcaggcttgaaaggggcggcaaggctctgtgtcacagcgttggtactgtggtgtgtgttgcttttaaattccagcccggtagcgtggcggatggcagagagacctccgggttgtgggggcaggagctggagctggatggagggctgccctgactcccgcaggtttttccctcagtgctatttccctgtcttgcacacttagagcctccatttaatgctggttctcttgtggttcttttccctcccaaagacaagccaaacggctcctgggacagattgtggaccgctgtcgaaatggacctggctttcataatgacatagacagcaacagcacaatccaggagattctcattcccgcatctaaagtgggtctggtcatcggcagaggaggggaaacaatcaagcagttgcaggtgtgtgagcccggagcacggagcacagcggccgctcgcagcaggtcttcagcttcctggcccaggagatctgcttacggctggcattccctggctgggctggctttgtgcagcattgtgctgaggcttccttcctccatttgacagacagcttctgaacatacaccacggccacgtctgatgccaaatatgatgccaagtactagggcaggtgtgccctatcaggggccccagtgaactttgagcagcctttttggcagtgagctctgtgagggctgcttttatcatcataggacagcatctcagataaaagtgcagtatttggagtcagaggctctgacccagcattcttcctcactgattgatcttaaatgtgctcatttactttttgaaggttcagggtctttgtgtgtcaaaaggggcaagtgcaggcttcactgttgtgatggagctaaaataatagccgttcttttctttttatgtaagagcctgttactgagtgaatgttccatgagcattagctgctgttagtgccagaatccctcatctgagactctcgggaccaaacgggtttcagaatttaacactcccagcaagttctggggttgtaccctgaaatcaaatgcatatttctgtagcaaaatagaataatacactcagagaaaggcaaaaaatacactgacatgagttcagttttgctgccaaatgaattataagtaaactttctttcagaaaagggattttgcagttgcgagtaaaggattgtggcttcccttgcgtgccatctcataacctggtccttgggtcctggttgtaaggatggtatcctaatgtagactcagggagtttatcatttgggatcccagcctcccagttttggtccgccactcattagctctggacctagggccgtatgtgctgaagtagaaagatggcaggacttgactgtcagttccacagaagttctaatcacataatgtcaaatggagtgtgtgccaagtgcctggcattcagtgaaagtagctccttagtgcttagatgctccagggactggaatcattttaggagatggttttacatctcgcatttggacatggtcgtacccgacctatatgtctgctgtcacagaagccagcttcatggcccaggttggaaggcagtccctggtggtaggtgggatgtgcgcttattgtgggtgtgactgggtccgattttgtgctgccctgcatttcatgccctgcattattcatgaggctgtgctggtgtgtgttccccacaggagcggacaggggtgaagatggtcatgatccaggatggcccattgcccacgggagcagacaagcctcttcgtatcactggagatgcatttaaagtacaggtaggaaagtgccatgggttgggtgagtcctggctgttggggctatcactcggtggtaccctagagcttttatcttcctcaagtaattgtgaaactggcagctccgttattgaaggtaaactgttctcaacaaagtttggtgatgaaaagaatctaggtttgtgctgcccaaaaccagagtccttagctacttgtggctatttaaattcactcagattaataaaaactgagctcctcatttacaccggccatatctcaaatgcccagtaacacctgaggctggtggtgactgttttggactgtgtgtgtgcagaacatttccgagctcttgctggtggcacggctcaggacagttggttttttgttttgtttcccccacgtcatccttccaggtgcagttttgatttgctgacctggggtcagctgagatacaggctctgcttggcgtttacttgctcgttctcttctgggcttattttgcaagcccttcagctaaggttggaggtgagcacagggtgagcaccagagccacccaagtgcctgggcaccctcagagcaagtgtcctgcgccccgagctgccaggcgggacagccccgctggctggaagcagtaagggacttggttttctatcccctggggtggtcctgtccttccaactcttgctagtagcaggaattcaagtgggcggagggtgtagggtttttgtctgtcctcagtgaaacacagatctacttttttctgccacctgcagcctgtcttgccattgccacattcagagtagctccggggtgatgctccttggtgagccaggccaccatcaagaatgggtcttctctgggaagaatgggtcttctctgggagcattgggttttgatcagtgaaagtatccagtccctggcaaaatattgcccccagttctgaaccctgtccttcagctaagctggtcaaggtacacctgtaaaataacagctttagaacaggagtgagggcagtggtgggtatggttctgcctggggactccagtcagtgatacggttgttcacttccatcgggccagagtccccatgcgctgcctcctccagagctcccagccttctctcagtgcgaacagttgggcatttaaggaaccagattgcctctcgcctttccccaccctgctcagcgtccggccgtgggctccagtactgtgatggtgttggatccaggcctgtgggcggccacagagtgcctgcctcttggctgccctccctcagaggccttctttttctatcacagcctttgatggtgtcttttgtagggaaaaaccccaagcaaagaatatatcattaatgtcccataaatttgcaggaaaataattttaacttaacgggttttagtgatttttaaattttaaaactgtatatttcattttttttttttttttcatttaggagatggagcctgctgtacttagggcacctatgtatctcttcaacctgcctaacattttgctgtatgtgtgtgcatgtgtgtgtgtttctttaccattgaagtggcagatgttatgacactacccctaaatccttaagcatgtgtctcctaagaataaccaggcctaagaaaactgtacttctgaaacattatctggtatccagtacatgtccagatttctgcaaatgtcctaaggttgtcctaagatttaaattgctgacgggtttgttttgtttcttcctagacacagttctcacattcccttgagttgtaaggtacagtaggtctttagcgcagattcctgtgtggctggtactggcatgggttggccaacatgcagtgatagacttgccaagtgtgtgttttggggagaagaacacttgaatctgcctgggatatagtgacgtccacaaggaagtctcaccagtaggttatagaaataagataggcttgcccttttgttgttgttgttgttgtttgtttaaagcaatgtgtttggctttcagccttttctttttaacttactggagtgcctctgtgttgtaaagccttggcaaagttctctgtctcatggacctgccctcagtgggcgctcttagacaccccttcctgctagaaagaaatggcatcaagaaacacctaggccagtccactttattgatcagaaagaaaaagatttaaaaatgtaaaaacacctaggggtgataggaatccatttctgaccacacgcagatgtgctcacccaactgaggctttttatagaaggtggacccttccccgtgtggacatttgggcagtggaaagaacacatcacttaagatacgatacacacatccccctacatgtcccataagccataagtgaattgtcctacagctgagcgcctttaaacccaagttaagagggtttgatcttgaaatttcacctggtgatgtatcttttttcaggaattttttctcataatgctttttgtttgtgtttatgcagcaagcaagagaaatggtactagagattatccgagaaaaagaccaagctgactttcggggtgtacgcggcgatttcaactctcgaatgggaggaggcagtatagaggtatgcttaaattacaggttagtaggcaaatgagatgaggactaaagttgtaggtcacacttttgttagctctttaaccctgagcaagttagttaagttttgtctcaaaaccttaagaattctctggctccttagggtgggtgtgagggtggactggaacagcagcagcctgcagtgagggagctggctacacttcagggcgtggggccatttccctcggttttgaagctttgctttagaggttaaccagttgcccaggtaaaaaccaaagttcaggttttcttggtgatgtatatcatgattctgtcaaactcagcagcctgtgtttattgatgaggttgcaatggggtcagaatctatcctagagaatgaaattttgttgtatgcgacaacatggatgaaccttacaaacagtatgctcagtgcaataagacagatacagaacaaatattgtacgattccacttatctgaggcacctagaagaggcagatgcatacaggcagaaagtagcaaaagctgtcagatgctgggggaaggaggagtattgtttaatgggtacagagttgttggggatgatgaaatgttttggatatggatggtggtgatggttacacaacattgtgaatgtatgtaatgtcattgaattgtgtacttacaagtggttaaatgataaatattatgtgtattttagccacaataaaagaaaaatgaaggaaaaaaatgcattttaaagaaccgctagggctatgcatggtggttcacgcctgtaatcccagtgctttgagaggcttaggcaggagtactgcttgaggccaggagattgagatctgtctgggcaatatagccagacaccacctctaccaaaacaaaaaaaaaagtattttaaattagcctagtgtggcacattcctatagtcccagctgttctagaggctaaggagggaggctcactcctcccaggagatcgaggctgtagtgtgctacagttaacaccactgtaacccagcctggataacaagtccagcccaggtaacagtgtgtatggtgtgtttattggaaggcaaaattactatttttcatcttttatctataaggcttattcatttttataaccattttgatcaaatctcaaattggatgcatttaacagttaagaatgcagttcaggccgggcatggtggctcacgcctgtaatcccagcactttgggaggcagaggcgggtggatcacaaggtcaggagttcgagaccagcctggccaatgtggtgaaaccctgtctctactaaaaatacaaaaattagccgggtgtggtgacgcgtgcctgtagtcccagctactcgggaggctgaggcaggagaatggcgtgaacctgggaggcggtgcttgcagtgagcgtagatggtgccactgtactccagcctgggcgacagagcaagactctgtctcaaaaaaaaagaaaaaaaaaagaacgcagttcaaccacagtattattcctaaaagggaaaaatgtcctttattatatcatttccaggaatgcactataataaaaactaagttgcgtgttaaaaaaaaatgtgtcctgggccgggcgtggtggctcgcgcccataatcccagcactttgggaggctaagacaggcagatcacttgaggtcaggaattcaagaccagcctggccaacatggtgaaaccccatctctactaaaaaatacaaaaataaactgggcatggtggcgggtgcctgtaatcctagctactcaggaggctgaggcagggagaactgcttgaacctcaggggtggaggttgcagtgagccaagatcgtgccactgcaggctgggcaacagagcgagactccatctccaaaaaaaaaaaaaaaaaaaaaagtgtcctggccagacacagtggctcacgcctgtaatcccagccctttgggaggccgaggtgggcggatcacctgaggtctggagttcaagaccagcctggccagcaaggtgaaatctcatctgtactaaaaatacaaaaattcgccgagcatagttgcctgtgcctgttttctcagctacttagaggctgaggtgggagaatcattggaacccgggaggcagaggctgcagtgagctgagattgtgccactgcactccagcctgggcaacagagcgagactcagtctcaaaaaaaaaaaaaaagtgccctttaaaaagacaggtttgtgaaaagttctgatgtggtttggtttctctgtgcctaggtatctgtgcctaggtttgctgtggggattgtaataggaagaaacggggaaatgatcaaaaagatccagaatgatgctggtgtgaggattcagtttaaaccaggtgggtatgatgatttaaaaatccttagtgttaaaaaaaaaaaaaaatccttagtgttaaaaggatgataaaacaccttacaaaacaagggcttggctattggttcatgtgtattcacctttctcatccttgcaacatcctgctaccagatgaccaatctcagtttcttctcccagccttcttttccctccccggatacatgtcggtcacctttgatttccaggccttttttcttttttcttcctggagtatatgcatagtatgtcataaatgcatagtatgtcagcttctgattttgccaagtaaaattttaaaatatatatgtataattttgattttattaaattggagataatttaaaaccacacacaaagacaaaacatcttagaataaaggacaaatttttaaattttataaatttgccttaatgagcaaaattttcgacgtggtctgaaaagaggaaaacatggcaggctcttctctggaagctgttgccatagctctgctctgactcccttggcttttttaaagtcaagctttgttttagttctttaatgatacattttttaaatggctataattgcataagaattgagcattgacctgaaacatgcaaaacaatataatgacacacattttcctatcacccacatcactccaaaagagtccctgcagctggcagtattcctgttgccccttttggcaccgcgggtgagaatattgattgggaatcagattaatccttgtttccttctaacgttgggcttttttctaatcctgtctctcacctggctcctcagatgatgggattagtccagaaagagctgcccaggtcatgggccctccggatcggtgtcagcatgcagcgcatatcatcagcgagctgattcttacagcccaggtgggtccagctctgcagagtgtgagtgtttgggctgcagaagtggaaagtgctacccggggctctcggtgcagcaccatagagctgtcaccctgaggcgtctcaagtcacattatgggaaaccagcagtttctctacatcagcctctttcctgccttcttggtatttttttctgctcattaattattctgcctttatttacctcaccatctagattgcctttacacagtaagtttctggctatttaaaccatgtggggaaataccatggagattggtcgccaagtttcaaataatcaagtgtatttaatgttaatctgtgttagtgaaatccagtcttagtggtagaagacacttcagggtcctccaaagtcctaaagctgccttcatgcacttgatttcatgcacatctttggactgtgagccagcctgtgtgacagtgctaggaacccctataactgatggtaggactgaggatacatttgagaatgaccagaacggaagaataaagcaagagattggaaattatagtcccagctctgccatcagtcatgtgaccttggagctgcctttgaacctctgggtctggtgttcccagcagcagactcagggtgctttgcaccaggcagtgctctctatgtgatcccctaagagccatctggtggttcttactcaaattacaaatgtgtaggcccccaccccagatctactgaatcagcatttccaagggagggtcttgggtcttcactagagacccaggcaattcttaagattagacaagtttataaaacggccactaaatcaagctcgttcagcctgtgggctgcacgcagcccaggaacagcattgaatgcagcccaacacaaattcataaactttcttaaaatgttacaagattttgtgtgtgtgtgtgtgtgtgtgtgtgtgtgtgtgtgtgtgtgtttttaagctcatcagctatcattaatgttagtgtattttatgggtggcccaagacagttcttccagtgtggcccagggaagccaaaagattgaacacccctgctctaaatgatctctaacatcctttttttgtagcaagagtttatgaaccttggccaggcacggtggctcactcttgtacccagcattttgggaggccgaggcaagcggatcacctgaggtcaggagttcgagaccagcctgaccaacatggtgaaaccctgtctctgctgaaaatacaaaattagctggacgtggtggctcacgcctgtaatcctagcactttgggatgccaaggcaggtggatcacctgaggtcaggagttcaagaccaacatggtgagacccgtccctactaaaaatacaaaattagccgggcgtggtggcgcatgcctatagtttcagctactcaggaggctgaggcaggagaattgcttaaacccaggaagcggaggttgcagtgagccaggatcctgccattgcattcccgcctgggcaacaagagcaaaactctgtctcaaaaaaagtttatgaaccttgcactgcagaggctgcgagatgtttgggagaaaaccttttcttcgagatctgtggcatacccagaaagttgactgtgcgctcctgtgcgtgtgtgaacatccattctaaaattgccttgtttacttggcagttgtctcataagagcagagtgcgggggaaaagcactccaattgtctcagctttctgctggtttagattctgggtaaacgttcactttactcttaatcaacatgagcaggttttgcccaacatttcttcatgtgttgaaaagtctgtgcagcttctcccttccatgaaatagctcttagcttgaccaggttcaccctccacatttaagagagtttaaatactgcagctccaaaatgactccgcggacagcggctggaatgagacttgctgctgtctcaatgaaagggctcttcctctgtccgctgttagatttaggtttttctctctgctgggtgaacagtgggagaatgcctcagagacttctccagccccacatggggaggaggccttggcaggttccctctgttcctcccttctgaagtatccctgaatggtcactcttgaacctgttactgctgctgctgcttgggggcacaacagccaagaagttttctaaaactgagtaaaatccgtttatccttcttgctgactggagtgccaggtgttgtgactcatagcagtgcctggttggggagggtcagcaggctgtgcatatctgacttcccataggcccagtatgtgtccgccgcaggaaagaggggcctcagctgcaagggagaaagcagttcttgatgcctgtagatcggggcccagtgaggaaagctccagggagaaaggccgctgggcttcagccttggagtttgtgtctgcctatttctgttggatacatttgagctgtttatgtaaccacgtgtgttcgtctgcacaggtcctccccagatacacctgtgatcggtgttaattctggcttgaaagagcccttcagaatgggaagtgtggaaaggtgctaggttctgatgggtggcattgattacatcctgtcacttaacctcctccctggaaaagagaggagcagtggtgctgtggcagtggcagaggtcgctacagccctgtgatctttccaggaaagagacggctttggaggcctggcagcagccagaggaagaggtcgtggccgtggcgactggagcgtgggagcccctggtggcgtccaggagataacatacacggtgccagccgataagtgtggcctcgtcataggcaaaggtaagaggcagctggggtttcacatcccccctcagctgtttggcttgagggaaggcaggtcacgggacctccagaacctttggtgaggtccctttgctgctgcaggctggggctgcccggtctggaggcagtagccaccttctgccgaaaccctgcttggcatggttctctgaggctgctgacgggcctgttgtgaggagcaaagtgtattatttctggtgagtatgaagagacagcagtaaaactccctgcctgttgagggcagcttagcttggtgaaaagataccttgcgcaagatggggggcatttgtcaatcgactgattggtaattaactcacctccaaggaacttagagggacggttgagacagtatcctcagtgaaaattccttctcgacagtgtgtcacttgtttcccttaccaggtttgagtatttggtcttgatccgcgtaacatgtgaaaatggtttttatcctttctgcatatttaccgtgagtcacggactctctgtggagggaaataaacattgatgtgttagttttttctgggcattttggagaacattaggaagaaaccctcattcatggctactgtagctccttcctgtccttcactgagaaccaggagagagcagccacatttctcagccattggcagcagttcatcttggctagccctgggacccagaaaggctactgagaccagggccgaggctgtggggccttcccagtgtagcagcagggctcggcttccgtggggctctgagccaggcctcgctgccagcgggggactcccgttgtcactgggtttcgtatttgccttcattaggtatttgacagcatgtggagaaaacagtcgtctctccagagtttctcaaatttctttgatcaccaaataccccttagctgcttgaggggcgctcgtattggataggcaggacttggggatgcttcaccagcagagacctccagagctgggcaggtgggagccccccgacactcacctcccaggagctgccctcgtccctgctcacagacactgtgggcttatgctcttgcaaaatgcaagaaaccgtgttgtcttttagactgaaccactcagagttggtatgggttcgtgttcatttgccggcaggtgtgcgggctggtgagtgtttggggatattgcaggctgcaccagatgctgccagaagtcccacactacccaggccgtcagcctgaccgctgtgagactgcagctagttgatgcctgtaggttgacgattagctagatctagatttcttggccttttgcaaactattttgtcggcgaagttttcatttgcttgtgtctctaaaccctgactgagcattgttgcctcaccatgacaggttctcatagtgagcccttggtgctcacagagcagcccctcgtagttggtcctccacaaagtcatcctgagtgattcctagaaaacagtgatgagaacgaagcagtaactggtctgtgtcccatgcttgaatagcagcctaaagaagcctaattagtgtctcggatatgggagggtctttctatgtcacacacacaccgcactaaacacacgcacgcacgcacgcacgcgcacacacacacacacacacacaccccctacccctcagggcccatgtgagacatctcttttccttgagatgggcgcctgggcaagggagagaggagccccacgcagccaggcccatctttccttggcctctggcctggacagacacagagcctccctggcccctgctggatttccatgataaacacagcaacattgacagatagctcagccagcctgctcttgtcagccaggccttttagcaggtttgattaattgctttacgatttcacgtccagccagggggccactggtggggcacttctgccccccatcaggtagaagaatggagcgggctgctgaatgagtctatagacagccaccatgtgccaagctagtgacctcattttgaaggaagatgaacttaaattaactccttctggccccacgaggttttgtggcgcctcctcaccttattagcatgttcccaaggcctggggatgaggggcccagtggggagggccggggcctcggctgtctggggactgcaggattctcagtcgcagacactcgtgtacttgtgcttttgcctccagaccaagtggatctggttggaggctggtagggttccctcgagtcttacgtgtgcctgtggaaatggtctccattttggtttctattcttttttatttttttttatttttttgagatggagtttcgcttttgttgcccaggctggagtgcagtggcgtgatcatggctcactgcaacctccgcctctggggttcaagcgattctcctgcctcagcctcccgagtagcttggattacaggcatgcgccaccacacctggctaattttgtatttttagtagagacggggtttctccctgttggtcaggctggtctcgaactcccaacctcaggtgatccactcgccttggcctcccaaagtgctgggattacaggcgtgagccaccgcgcctggccaagtctctattctttattgctccccaaaaaacattgcctaggagcctgcttttcatggtgcagagaagataaaatccatggcctccgagtaaagggcagaggtaaaggtcccctaggaggggcttgtaccggcccagaggaaatcagagctgtgggtgctggcccggtgtccccagacaggcgggtctggccagggtggaaaatgcagggatgcttctctgaaactccagcgggaccttaaggaaatcacaagcacaacatttggttttgttagttgttttttaaatttaaaaccaccctaaacttaaccaacgtcttctgcatgcgaccttatctgcatgccatgtctcccggcgtcttttctcccccgtaagggcagcccctgctgccttcaggaaggaccacctgcctttttcattcctggacctctgtagagtccttgcaagacgcccttgtgtctgcctttagcgtcccctccctactggcccgataggctgttgaggcagggcttttctggcagtgggtagagagaagcttggagtgtttggaggattgtggacggtgtcttggtgaggtgccacatggcatttagggcctgtttttttgactgtgggcatggaggaggggccgacactggccccggtctttgcttttgatcacccaggctcgctgctgccctataccagctttggagcagattacctttttctccacttttccaaactgtgctccaagttatccttgtattctggctcctcctagcaacactccatcccccacagagttgagcagagcagatccgcaagttctgtgaatttcagaagaagaatccaactattgttacgctgctggagcttttattacgcaaatttcattaagagactgagactctccgcaggtttttgaaagagaccaactgaatttttgttagcccggctccacccaggtctttgtgacctccaccccatccttgcactgcctgtgtagaccgtcaccccatggaggaggcagggacttgagaagtgacagggtgggatactgaaggcccgagtgggctccaggcatggttgggcctgtggtcatctgtttggcctatggagaaagttgcccacagccaggctgaaggccccattgtcatggaggcgcccttggctcaccattcttgtgctaagaagggcagtgccatccctggctgggcgggagccccacagctggcccccaagggtgagctccatggtgtagacccacaggcctcagcccagacctggtctctgggccactcacgaccttcacatggaggtttcacatggcatctgtggcctcagcttggccttgagagaaagtccagcttcactccaaacagctagttttgcaagtgagagagccctgggtttagttggaaccactttggagtaaatagagacaacttctctactgtcagggcaagtgccgacgtgcacaaaatccccccgagttgtcttctggagccaagtgccccagagcctcaggagttgccgcagtctctgcttactcttctgcctgtgttgtgctgtccgcagggggtgagaacatcaaaagcatcaaccagcagtcaggggcgcacgtggagcttcagaggaacccccctcccaacagcgaccccaacctgcggagattcaccatcaggggggttccccagcagatcgaggtggccaggcagctcatagatgagaaagttggcgtacgtacagggtccttcccccacctggtttactcatagctgttttcttgtggatgtccaaggtaccagcttttcccaccaccttgtgctgcttgtgcctgtgggttctcacatcacacgagggcaagccccctcctgctttgccgaaggggagggtcggagacccagggagtgccagagccaggcccagaagcaatgaaggaagcctggcaggactcaccaaggccgcagcagccgaggccccagagccgttcccctgcgggcttagatgagcggctggggcggcagcctccccccacgctgccccgggactccgctggcattgccctggcggccagcccagcaggcagctttcattgactctggctttagtttcaggcacctcaaggcagataaagaaagggagtgttgatggaggacagatgggccactgctcacctcaatggggacgtagaatggcagaaagagccttgggccagcctaagttgacgggagagtcaagcaggttggtccctacccccagggtgatgccagggcagttgtggtggtgccaggactggctgtgtggtggtattggtcgctggagggcagaagccatttctgcagcgcagcctgctgtgggaaggaaggctagtgtgagtgcgtaggtgtccttacttcactcgactccatctccccaaaagctgggctttgcctcggggtgggcctgggcagaggaaagaggtgtgcaaccaacagcgggtgagagctccctctgtgcccccacaggggaccaatctcggagcacctggagccttcggacagagtccattcagccagccacctgccccacctcatcaaaagtgagtcttttgcatcagtcttgcctgggagaattcactcgctccccagagatcccctgtcgtttccagctacttctagcgagtgccagccaaggcctgaagttctgggcgtgggcaggactcgtttcttttcctctcaccagcggtccctccggcctatcactcactgacctcagcgatggggtgggagcctctcagagggcagagggtcttctgtcccgactgccccctcagtgccctggggctgcggggaggggacgagccctctgttgtgaggcgctcagtctgttgtttcttttaccttttcccagtacctttcctccaaggagctccgggtgcttcccaaacatggctgccaaggtgaatgggaacccccacagcacccctgtgaggtaggtgacctgctgtgactcagttggggacagacggcactaaggtggtcacttggctattgccgacaggcaagggtccggtgatgcttggctggggtgagggaggtgagcagtgaagagggagacgacaggggtgacttgccccctataggaacgagtgaccctcttgttatccacagtggtcctccggcctttctgacccagggctggggcagcacctaccaggcgtggcagcagcccacacagcaggtcccaagtaagtgactcggggcggggagtgcatgccctccagaaaggttgcggcccacagaagtcctggggccaaaacgccctcgttcaactcagccagcaggcccaggatgcccctccccaaatgacaaggagccctctgggtggggcttgggccctcctgcaggcctgtaccaggggttgtgcatgctcagaaaaaggccccaagggaaactgcacaaacctcaggcgggctggggactctgggctggccctctcttggcccacctgtcctcagagttctgggcctctgtcactttcgttccctatgcatgggtggggatgggttgagccagcttctgctcctcctcttctccaccccttgaggggctggttcctggccctccaactccctgcccctgccttgggtggctgccttcctctcccctctcaggcttccatctcctgaacttttcagaagcaaacagctagggaatgacttcttctgcatcccgcctctccagggaggctggttgtgaaggagaaagtcctggtgggaatcaaagccgccaccctctctgtccccacagacgcttcaggaaccactgttgggtttcagagctggtctagcccctctggcatggccttcacaaagcaaagcagaacccttaccttagtacgatccacgttcttttgacccatctggagtttctgtcctgtgtttagaaaggcttcttcagtgtctgcagattcccacagcacccaggccgcaggccccgcctcacagcctggctcggagggcctgagccccctttctggggttctgccacttcagccttacacagagtcctgaggccagtgctgtgtggccttaggcacgccctgccttctctggagctccactttgccacatgtaaaatcaagggtttgggtttgaattctaaagtacttgcatgctctgaaattgtatagttgtgtttcttccctttttttccccagtatcttattatgaaacgtttcaaatatcttagaacactctgcagtgagcacccacaaggcacccagatcccaccatccatcccctttccctctgctcgcttggccataggggctaaccctgtttcctttcctcggctcctcacctgctgttctagtctgagataatcctccaggcagcaaggtggccaggattgactctggggacactgaggcctgggaggccttcaggggaaacggccccctggcgggtggaacgggcagaggcctgtgggctgaggaagggagagtgcaggaggcacccggtggtcttgccgccattgggcagccttcatctcatgttgtggagcttggctttttttgtttattcaggggttttgcagtggagaaccggtttgggttggtgaaatactgtttggcggcgaagtcctgcttgccggcgccctccgcgtccgagggaagagtgtttgctgcctgtgtccctctttcgccctgcccctgtgggaggaagcggggcgtctccttccctccttcctcccgctgcttgcttcttccccacgctgctcctcagtatgcagtaaagtgaactagtggagaaagcatttggctgcatgctctctgcagtggtttgcccttcctccctgcttcaggctacaatccttacaggagacgagacagtgagggggtcttttgtgggccttggcaggtggacacctgagccagccccggcctgggcagaaggagaggtcctgacccgccactgtggtcaagtctttgaaccccctcttgtgcctggcagggtgctgaggctctgttcccccatgctggctgtttctccgcgtcccccagtcttcactgcccacatagcctagagggtgaacccagggtcctgcacagaagagaagggctggaccacccaaacacatgcaccccctttccctctgccctaccccagctggcctgaggctggacagggtccaggagcccactggtgctgcctacccctgctccacatggcccctccacttcccttggtccagaggcacagcccccaggccttgaacagagggccacgcgaagagagtggtcagcagcctctggagtctttgtcctttggaaggctgattggggagcctcagaacagcagtggctgtggccgtcaagcttgcgtctccatctgaagagggtcaggctagccttgctagttgcctcgtgtgcccagccccacccttacagtgatcttagttacaccccttcccccagccctgccagctgccacctccttcccaggcagggctgcggagccgtgtgtggccaggagcgaggtggaggagtgcagggcagggcctgcagctggcgggctggggccgaggctgtgaggagcccgtaaggcctgactgcttttgtgttcttcgcacaggccagcagagccagccgcagagcagccagcccaactacagcaaggcctgggaagactattacaaaaaacagagtgagtgcccggccctcctaacctgtggcagcacagtcccctccagcccagagacttcagagtccaaggctcactgtcacctcttttttccctaatgccttccctgtgtggcttgatctcattatttgccttcgtcctccaccctgtacctgcctgcttctttctgtcaggagtctgggcatagtcagtcagtgaccacaggctgccctgcgactcggcacatcccctcctctttattctccccgtgctgggctccaaaggacttgaggtgggcgtggcacctggaagtgtgggctcagctggcgtctggtctccttagggactgaaagattccggctgggtgccacctggccggcaaacagaccaaccagacatcttgttctctgtcttggtgcttcagggcagatgaggagaggtggtgagattcagggaaggaggccttacctgggcattggagctgggtgcttagtttctcttcttaagtaggcccgttttctaactaccagaaatgaaaccagccttcagagcagggcgagggacccaacaagcaaaaggtctctggggagtcacataaaatcaggaccagactctcgggatatatcccacgattactagaccggaggactgagggcttgtttaaagaggtatctcacgtgccttgtgtttggaggatgtttcttgctggttggaagagatcgggttgaaggctaccagagaagtggtccccctggtgttggcatcatcgccaggttcatggcccttctaggggttggaggtgggggtgttgagtcatggtcaccagagtgctgtaagctcagctgcccagtcttccccaaatcccaattcccagacccctgggcctgtgttgaagctgttcacaggatttggacactatcacaggcacccaagttaggtactccccttctcccccacccccaccccaggatccccccttctctgtctgtcacagggccctgggagctgaaggggcaggcagggagatgcagagaatgcgcttccgcagagagaaggcaggcgtgaggattggtcttcacaggcatagcaggggccgggcaacaagaggctaacagcaccttttgtagcaagcgctcctgcaacaccagcctcacctcactgcctcccagacctccctgccttccagccgtccggagggagagcagatgcccagggcctttgggaagggtcctgcccagtgcacctccgctcccgataacctgtgtttcctcctttgtcaaccaggtcacgccgccagcgctgctcctcaggccagctccccaccggactacacaatggcctgggcagaatattacagacagcaggtcgctttctacggacagacgttagggcaggcgcaggcccacagccaggtctgtagctgatcaccagcaccgctgccactccctagccccgagcccctgctcccaagccttctgtgtttcctgaccccaggatgagagcgctgggctaggaggaacctctgggcgccatagctcctcagcgaggctgcttctgctgagagcccggctccagcccctctgtccctcctcgctctggagaaaaagagtttaggccaagtgggaggattgggggcgcagcccctacaaggaagtgcctgaactttcctcaagtccaggccccagacctcagggctgattagtagtctctctcttcctctaagcctcagtttccctaaccgtaaaggagcaagtgcagagggtgcgctccggcgactgctctcgaggagggtggagtggccaggccgtcagccatgcccgggcagcagcaggaagcagtgagagggcaggggggcagagcccagctttcctctcctgtgcacaacctagagggttctgttcagaggccaaaaacggatttcttattaaagaagggaagacgtccaaatgttcccacagggcgcatttcccacctgatgccagtcaggtcctcatggataacatttcagttacctcctggccctggactcagctggttgggcctctcactgccaaattggccgtctgggtctggtcctggggaaacaggtgtcagggctggtggtgatggaggagaagcgtggctcccactgtccgctcttccctgccccaagtccctagtggagagagaagcccaagacctcttcagcagaggttttgtctggcccagctcccgtgacgcgagacctgggggaggtcactggcacacagacctgagaacctgccatcacagactaattcctcttcccttccgcccacaggagcagtaggacagcgtcctcgtggccaactctcccctcaaaatcattgtcaaagaaaacctatttgtaacagaggtttttacatttgcaaaccttttgatgaagaactgttgttttgttctgtgaaacactatatttagattaacggaatttttctaaaaatcaggaaaattagttactaaaaattgctgatcatttttgtttcattatttttgttatttcaaatgtataagctctgggattctttttggagcaatacctacaaagtcaggcaccagaatgtgcctcagagctgtgacatttcaacatgatggttttggtttggtttggttttgtgtcctttttatttgcagttttttctgttgcaacagaaagtggcttggaagtcttaggtggtatgtaacaaattctttttaaaaattttaaagcagtatttaagtattcttaaatgtgtaaattcatttaatgttttacttctaatttcttgtatcttggctgtctggttttattgcatttttaaaaaaactgaactattatgtattgtaatgaatgatgtgaattctgaactgagacagataattgtattgctgtccaacaggggttgggaggggcattttgtagggtttgtataatttctagagttcgaaaggggtaatataaaaatgtgctcgtgtgtttagcctacgtttttctcatgcctccattaccagttgcaattgtgtatctaagacctccaagcttgtttttaaaacaaaacaaaaaacctttctctattatctcagaaatataaatactgttatttttaatattaagaaattcaatataacttttaacacacactgtggaacattaaaccgtataaaaatgtagttataactatttttaattccaaggtgttgtttgcttttttcttttaaatattttcttaatattttgtcagattaactagatgaataaataaatctagtattaaccgcattatgaattaaataattttgatttaatgaaagggataatatgatttccagtgtttactgtagtgtatcttgtacagataacatgtatttttaaaggaaaaaaaacggaattgaagctattttttcttgcatttctaattgacctgagggacattccgtttgaaatgtactgaagttacagtttctggttttttctccttatttttcttataatgcttgaaatgtctaactattaaaaaagacaattggaaaatgttatgcatggggtttttaagaaaacaaagtgttctttttatttgactgacaattcattttacactctatataataaaatctccacaaggcatcttgtgggcaaagtctttctggcctgtttgctttccattcgccggttcatccctctgcccctgcccgcggccgcccgagagggaaagaggattcctgcgggcctcgcccgtcatcttgcaccgcgtccacccgccttcgttggtgcacagtctagatgtctagctagttcgttaagctaattttatgttaatggctctgtatgatttgacagcttgacttgagagccgtggttgggctcagctccccttccctgtcacagtcaggcatctgtaagtgagaagtcagtatgggagtgtcatcggatggagctgggagatgcattgaagggcgtgcggcgggtcagcagacttctgcgactgactgggcagccccttgccctccgcccgctccccttccctgcgtgcccatgcacacacattcgcctgcaaatgtaggtgggctgccctaggcgcggtgtgcttccctgactgttgctgcctgcatcccccacctccttgtccccagcctcacctgtggctgtggtggtggtgctttctcgctcttagccccgtgcccacggtgggacaccagatcgccaggagggctgggaagcatcagcacacgtgctcgttatgtcctgtcctttcatgaagaaacaaatggggcgtccttccccagaggtgttaagttacagtcctgtggtcttaggactcgtggcgacagtgtgggcctcagacttggaagggcattaagtaatagcatcagccctcgcctttttttttccttctgtcccgttggttggggtgactggcattgagcagtgtctgctttcacgtctgaggggccctgccttcgccctcaggctttctgtgcgggtctctacttagatatagagacctgtttccatcctgaacggggcttgctgggctgtgcctggccaataccggccccttgtctgtactccaagcttctgacaggaggggaaaaaagcagctgtggctccttcaggccgaaaaggggtgtggagagcagcccatctgcggccatggcaggcctgttgagagccggaagacaaaaaggagatgtggcatttttaactgcacctctagagaatcgagtttgacgttgagaaattgaatagtaaaaggcacttggaaagtggggggagggggccgagtgggaggagggcgtaaacgctgatgacggtaatgggaattcgggagagggcattacagagaagacttccttctaattcatcttccaagctctgtgccaaaacagcatttggcatggttcacagggagcgattgtgtgataatgaaccctaaggtgtcccttaattgaagactgagcattgtggtttgtgccaagagtcataaatggcgcaggcttgcggaggatgcattttcttaaatgtatcggtaagtacagattagcgcttgtccccagtgaaatgcccatactataaattatggaaatctctctttctctctgatgcaatcttttattggggggagggggtgtggtacgacaggaggcggggggggaaagtttgcaagcatatgaaatttggcctctcattaacatggcgcccaaggaagatgattttcatcagcagtctggtgtactggaggctaaagtgcttgaaatgtaccaagttcagcggttgtgttccattaagaaagatgcatggtcatcactgtaagggcggtcggggtccgggaggcggggcgggcgcttgcccagtctgtcttctgaatgcatgccccacccccacccgccaccgcccatgcctactgggtctctgccagcctcccaagttcaggatccatcaaggaccctgctgagccgatcccagccccacccagaagtttgggctggggttgaggagttctcagccagcgggcctcaatcagtacccctggcctcccatcagataggaggcaccatctttccagggtcactcgacagtggtgaccacccatgatgtcccagagcccccaaggtagggtcggctggggcacagatggcacagtgcagtgcctggtccatgagaacgtgggtcaccccagagccgcagcttctagctggctacagccccactctctcccagccccacttctggtccactagggcccagctggggttttttaagatgggctgaagcaaatgggcctgatagatgcttagagattaatggccagaaagtggcttgacactcaattccgcagggggctgcaggccctgggtctgtgtcttgggtagggtggaaggggaagcaaagacaaccctcactgcccttgaaacaatggtcatcttggctgtcctttgtcttgaaggtgtttctgtagcatctaccaagggggtcctggccctttccaggtacctgcttccaaggtggtctctgcaccctgggaggtagaaaggcctaatctccccatttcacagaagagggctcagagtcaaaggctgagacctgcctttattcacacgggcatggaggggccagttctgtgccaggttctatgctgcactccgtctggggcttcagaggagagcgtgaccaccgcctcctgggggcgcactgtcttttgtagtcaccaccaagggagatggttggcaggatgggagaagatcttgaaagttagggttgagtaccaacttggccagccctggaagtgcactacagtcattcatcattttcaattccgtatttgcaaattcacctactcactgaaacgtatttgcaacccccaaatctacccccacagagcatctgcgggtcattcacggtgaaaaacgtgagttaccggatgcacgtgttcccagctgaggtggaaaaggcggcgctctgccttctggtttcagctctcgtgtcataaataagcacttttccttgcagtctacttagtgccacagtttttgcattttgtgccttttttttttcttttttgacagttttactgtctaaagtggcccccaagcatggcactaaagggccatctagcattcctaagcataggaaggctgaggtgtagctgatggagacaatatatgcgttctgcctcttgcaggcctgagttacacggctgttggccacgagttcaatgttaataggtgaacaatatacatattaagtaaggagtatttatttttatttattttttatttttgtttatttatttgttgagatggagtcttgctctgtcacccaggctggagtgcagtggcacgatctcggctgactgtaacctccgcctcccaggttcaagcaattctcctgcctcagactcccgagtagctgggattacaggcgcccaccaacatgcctagctaatttctttgtatttttagtagagatggggtttcagcgtggtcagactggtttcaaactcctgacctcaaatgatccacccatctgggcctcccaaacagctgggattacaggcgtgagccaccgtgcccggccaatgaggggtctttaaacagaaacacacataaaacaagattatggagtgctgatgcatgcctgtagttccagctactagggaggctgagggaggaggatcacttgagcccaggagttcgaggctgcagtgagctatgtccgtgcctgggaatagccactgcattccagcctgagcaacacagcaagaccccatctcttaaaaaaataaaaaaggggctgggcgcagtggctcatgcctgtaatccagcactttgggagaccgaggtgggcaggttgtctgagatcaggaattcgagaccagcctggccaacatggtgaaatcccgtctctactaaaaagacaaaaattagctgggtatggtggtgcacgcctgtaatcccagctactcgggaggctgaggcaggagaattgcttgaacctgggagacagaggttgcagtgagccgagactgcaccactgcactccagcctgggcaacagagcgagattccgtctgaaaaaataataataataataataaaataaaacaaaataaaataaaaaagattatctatagattggtgtggacactggcttgcaggaaccttgccttgtatttcccttaggaacaagggtttagtatttgatgattcagtatttgcagagactttatatatcactaccatgaacaactagaatccactggctcttactttcctataaggaaaatccgactcttatcccattttggagatgaggaaatagggttttgcttgtctgtttgttttttctgagatggagtcttgctctgtcacccaggctggactgcagtgacatgatctcggctcactgcagcctccgcctcccgggttcaagcaattctcctgcctcagcctcctgagtagctgggattacaggtgcccgccaccacacccagctaatttttgtatttttagtagagacagggtttcaccatgttggccaggctggtctcgaactcctgacctcatgatccacccgcctcggcctcccaaagtgcggggattacaggcgtgagccaccgcgctcggccaaggaaacaggtttaaataggttctgatcagagtcataccatggttgtgcacatgtgacctgagaggtaaccaggactatgctccccattttacagatgagggctcagagaggctggaaactgtccttactcacacaggcacggaggggccagttccatggcaagttcgtgctccactctgctggggtttcagtggagagctacactcttgctgaggcctcctcaaaccttagcctggctgcgataccggcctgccttgccacacccacacacgagcagagccaggcacatgtgcaaggaatgcctcacgtggttctagtggggcctggcgagttcagcctacctaaggcagcagggtgtgaggcatgaatgtgtggacacttaaacttgggtctgagtcctgcctgcacctcatatgacctaacctctggtatcctaagtgtggggctagcagccacctgcccgcctgtggggctatgataggagtcaatggcacacaagtaaagcgcttcacacctggttcttaatgggcactcaaaaactggcaaccggcctggtgcagtggctcacatctgtaatctcagcactttgggagaccgaggcgggaggatcgcttgagccaggagtttgaggccagcctgggcaacggagtgagaccccacctctacaaaaaaaaaaaaaaaattctaattagccaggcatgatggcgcatgcctgtagtcccaactacttgggaggccaaggtgagaggatcccttgagtccaggaagtcgaggctgcagtaagctgtaatcatgccactgcactccagcctgggtgacagagcaagaccctgtctcaacaaacaagccaaaaaaagccgggtgcagtggctcttgcctgtaatcccagcactttgggaggccaaggtgggtggattacccaaggtcaggagtttgagaccagcctggtcaacatagtgaaaccctgtctctaccaaaagtacaaaaaatgggcagggtatggtggcaggcacctgtaatcccagctactagagagagtctgggcaaaagagtcacttgaatccaggaggcagaggctgcagtgagccgagatcgcaccactgcactccagcctgggtgacagagctagactccgtctcaaaaaaaaaaaaaaaaaaaaagccgggcgcggtggctcatgcctgtaatcccagcactttggtaggccgaggcgggtggatcacgaggtcaggagttggagaccatcctggctaatatggtgaagccccgtctctactaaaaatatgaaaaatcagccgagcatggtggcaggcgcctgtagtcccagctactgggaggctgaagcaggagaatggcgtgaacctgggaggcagagcttgcagtgagcaggatcgcgccactgcactccagccaacagagcaaaactccgtctcaaaaaaaaaaaaagaaagaaaagaaaagaaaggttcttccctaactccacttcttcagtcaaggggagagaacgatcaacaatttccttcaggcaaagggaacccacaggcctcacttttgttcccaacttggacagatgactttctgtgacttggatagatcagctctcttgatctgttttctttccttggaattggaccacacaagtggtttccaaattatggtaggttggtgtcaaggatttcatggttgtttaattcacatttcgataaaacacgttaaatattaaatgcatttaaacttttttttttttttttgagacagagtctcactctgttgctcaggctggattgcagtggtgtgatctcggctcactgcaacctccgccttccaggttcaagcgattctcctacctgagcctctcgagtagctgggactacaggtgtgtgccaccacgtcggctaatttttgtatttttagcagagttggccaggctggtctcgaactcctgacctcaggtgatctgcctgcctcagcctcctaaagtgctgggattacaggcgtgagccattgcactcagccttaaacatttttaaaaacaatttgtaaccataatgttttttaaaaacaccatgcactcaagtacattatatgctgcactttctttttcccttccttttttttttttttttttttttttgagagggagtctctctctgtcatccaggctggagtactgtggcatgatctcggctcagtgcaacctttgcctcccaggttcaagcaattctcttgcctgagcatcctgagtagctggaattacaggcgcccaccactatgcgctaatttttgtatttttagtagagacggggttggccaggttggtctcaaactggttggtctcgaactcctgacctcgtgatccatccacctcggcctcccgaagtgctttgattacaagcttgagtcaccgcgcctggccaaagctgtattattattatttttatttatttatttatttatttatttatttattttaatttttatttttttgagatggagtctcgctctgtcgcccaggctggagtgcagtggcacgatctcgactcactgcaagctccgccccccgggttcatgctattcttctgccttagcctcctgagttgctgggactacaggcgcccgccaccacgcccggctaattttttgtatttttagtagagaccgggtttcaccgtgttagccaggatggtcttgatctcctgaccttgtgatccgcccatctcggcctcccaacaaaactgtcttaattattgtacctttacagtaagtccttcagctttgttgttcttcaagattgtcttggctactcccagccctttgcatttctatacaaattttagaatcagcttgtcgatctcccaacccccataaaaatattttaaatttgctgggatttttactgggattgcaatgaatctatagatcaatttgggaagaactgacaacctaacaatgttgtagattcttttgaatttcctgttttcacagtcagatcatttatgaataatgatggtgttatttttttcttcccaatccttatgccatttgttctttgtattgcttgactactctggccaagaccttcagtatcttgttgattgaaagccatgagagttgtcattctggtcttgtttgtagcctcagagtgtatgtttggcatacagtttatctgataaggaggttttcttctgtttctagtttgccaagagttttgtcatgaataggtaatgaattgtttcagtactttcttctgcatctgtagagatcatctatgatttatctcctttttcgcttcaatgtaatgaattacactgatagattttcaaatgttaaaccagccttgcattcctagaataaacctcataatggttgtaaaggattatctattttattgatagatacatggatagatagatagatgatagatagatgataggtagatagatgataggtagatagatatagttgataagatatacatattatatatataattggtttggtttactaacttttttattaggattgttatatatacattcatgaaaaccactggtctgtaatttacaccacatttaatcaatctatattagtctattctcacactgccacgaagaactacctgagactgggtaatctacaaagaagagaggtttaattgactcacagttctgcaggctatacaggaggcacgactgggaagcctcaggaaatttataatcatggcagaaggcaaaggggaagcaggcacatcttagcgtggcagagcgggagagagagagcaaggcaggaagtgccacacactttctttctttctttctttcttttttagacgaggttttgctcttgttgcccaggctggagtgcagtggcgccatcttggctcactgcaacctccgcctcccgggttcaagtgtttatcctgcctcagcctcccgagtagctgggattacaggcatgtgccaccacgcctggctaatttttgtatttttagtagagacggggtttctccatgttggccaggctggtctcaaactgccgacctcaggtgatccgcccgcctcggcctcccaaagtgctgggattacaggtgtgagccaccgcacccggcccaaatgccacacactttcaaaccatcagatatcatgagaactcactcactatgatgagaacagcaagggggaaatcagcccccgtgatccagtcatctcccaccaggcccctcctcaaattcaacatgagatttggccaggacaaaaatccaaaccatatcaccatcgaagatgcataacaggtcaacttgtgctactaccttaactcatttctgagcaggtgtgtcctcattgcgcacattgccattgcggaatgttctaacactggtctttgaagtcatgcctgtgggcatcggctcttgtgcccaaaagttcatttctcagttcattacggaattccatgctcagatgccaggcgaggttcagcaaacagatggtctcgccatgaccaatcatggttctcgtgcagttaaaacccacaactaggccaggtgcggcggctcgcacctgtaatcccagcactttggaaggccaaggtggatggatcacctgaggtcaggagttcaagaccagcctggccaacatgatgaaatcccatctctactaaaaatacaaaaaaaaaaaaaaattagcctggcgtggtggcacgcacctgtagtcccagctacacgggaggctgaggcaggagaatcacttgaacctgggaggtggaggttgcagtgagccaagaccgagaccctgcactccagcctgagctacagagtaagactccatctcaaaaaaataaaataaaataagtacaggcacggtgcctcacgcctgtattcccagcactttgggaggccgaggtgggtggatcacctgaggtcaggagttcaagaccaacctgaccaacatggtaaaaccccgtctctactaaaaattcaaagttagccaggcgtggtggcaggtgcctgtaatcccagttactcgggaggctgaggcagaagaatcgctgcctcaacttccgggaggtggaagttgtggtgagccgagatcgtgccattggactccagcctgggcatcaagagtgaaactccgtctcaaaaaataaaaaaataaaaaataaaataaaatccaactaatagtgttgaggcaccagctgtacccaaggcattgtgctcagccctgagggatggggcaaagtcacttctccctgcatggagctgatctagcagaggcacttgtttatatctggcaatggttagttagcaattccactttataattttattttttagtgatcctcctacctcagcctcccagcagctggaactacaggtgtaccacacccagctattttttttttttttttttttttttttgtagagacgaggtctcaccatgttacccaagctagtcttgaactcctggtctcaagtgatcttcccatcttggcctccaaaagagttggtattacaggtgtaagctaccatgccctacctagcaattcaactttgagacaaaaaattcttcctaccctttttttaaaaatcttctgaaccattttattttattttattttattttttatttttttttttaattttattaaggagtctcactctgtcacccaggctggagtgcagtggtgcgatcttggctcactgcaacctctgcctcccaggttcaagcgattctcttgtctcagcctcccgagtagctgggactacagacgcgtgccaccacgtccagccaattttttatttttagtagagacagggtttcaccatgttggccaggatggtctcgatctcttgaccttgtgatcctgattcaaacaaataagcagttgtcaatgatgacagtttttgaactgcttaccttgttgttttgcatacactgtaatacaactggttcaggctgggcgcgctggctcacacctgtaatcccaacactttgggaggctgaggcaggaggatcacctgagctcaggagtttgagatcagcctggccaacatggtgaaaccctgtctctactaaaaatacagaaattagcagggtgtgaggctgggcatggtggctcatgcctgtactcccagcactttgggaggccgaggcaggcagatcacttgaggtcaagagtttgagaccagcctggccaacatggtgaaacctcgtctgtactaaaaatacagaaatttgctgggcttggtggaggatgcctgtaatacccgctactcaggagactgtggcaggagaatcacttgaacccgggaggcagaggttgcagtgagccgagataatgccactgcactccagtctaggcaacagagtgaaactccatctcaaaaaaaaaaaaaaaaacctacaaaaattagccaggcgtaggggcacgcacctgtagtcccggctactcaagaggctgaggtgggagaatcacttgagcccaggagttggaggttgcagtgagccgagatcatgccactgcactccagcctgggtggactgagcgagactccatccaaaaaaaaaaaaagaagaagaagaagaaataaatgccacttgtgcttgtatctgatctctttggctttctgcagtttgaatatattgtggctgggtgtggattctgtgtgtgtgtttgttttttatttgttttgctttgtgtgtacgtgtgtgtgtgtggtgtgtgtgtttctgtttctggtatttttgttgtgattatttgttgctatttatccagattggtgttctctgagtttcctggacctgtgcttatctgcctgtcattaatttttttatttttttatttttgtaaggcagagtcttgctctgtcacccaggctggagtgcaatgggcaacatggcgaaaccccatctctgcaaaaagtactacaaaattagccgggcgtggtggcgcgtgcttgcagtcccaaatacttgggaggctaaagtaggaggattgcttgagcctgggaggccaaggttgcaatgagccgagatcgtgccactgtactccagcctgaaaaacaaaacaaaacaaaacaaaaaaacttgaaagtcaccactttcattatttcattattaaaattaaaaagaaaaaaaaaacggccgggcgcagtggctcacacttgtaatcccagcactttgggaggtcaaggcgggcggatcacgaggtcaggagatcgagaccagcctggctaacacggtgaaactccgtctctattaaaaatacaaaaaaaaattagccgggggtggtggtgggcgcctgttgtcccagctactccggaggctgaggcaggagaatggcgtgaacccgggaggcggagcttgcagtgagccgagatggtgccactatactccagcctgggcaacagagcgagactccatctcaaaaaaaaaaaaaaaaaaaaattaacttggacaaactgaaaatcaatgacttttcttgcagttgaaacttttcttgaagttctctgaggtttcagagaactgagtttgcaaaggcaaagctccacccaagtcaggagagacaggagaacctggagaatcccagcgacatctgtggaccaggagcagaagccacgggagccctaagtgggaacacagatgggaactcggatgaattgctagaggctgagtgtggactggcatcagagggacaaagtcctagagtcttcagtctagggggtcccccacactttcatgggtttccctccaggaatcccacttgattctgtcgaagaaagatcctgggccgggcacgatggctcatgcctgtaatcccagcactttgggaggccaaggcgggcggatcacgaggtcaagacattgagaccatcctgaccaacatggtgaaaccccgtctctactaaaaatacaaaaattagctggacatggtggtgcgcacctgtagtcccagctactcgggaggctgaggcaggagaatcgcttgaacccgggaggtggagcttgcagtgagccgagatcactccagcctgaagacagagctagactctgtctcaaaaaaaaaaaaaaaaaaaaaaaatcccacaggctctcgctggggtgggtgtagagatccttgtgaaacactcaaagccttctagccaaggccccattccagggggaagagctttgccagagcctatcccaggtaggggaatggaattctccttccagccccctccagccccttccaggcttcgcaaagaacaagcacagtgctcaggagccaggctgcaaggaattaggtcgggaaggaacctgagccagagaaggtagtaagtggcaggggggaaaagtgacacccctgcagggatacttgtgaatgtcacagccccaagacccaggaccaagacaggactgacgacagaatgttccctctctcccacacctcaccacacccacaagctgcggtaccatcatgggagtcacaggcgacagaactcaaggctcagacctcccaaagtcaggagggagacaacaatgaggacagtagaagacgtggagcctctggcacctgcagccgcagcaaacacctaacactgcccagctcctagaaagaggataatacagcctcggccggacgcagtggctcgcgcctgaaatcgcagcactttgggaggccgaggtgggtggtcgcttgagcccaggagttcaagaccaacctgggcaacatggcgaaaccccatctctacaaaaactacaaaaaaaaaatagctgagcctggtggcacgtgcctgtagtcccagctactcggaaggctgaggtaggaggatcacctgagtctgggagttagaggctacagtgagccttgatcatgccactgcaccccagcctgggcaccacagcaagaccctgtctcaaaaaatttaaataaataaatataaaatataaaagagctttcctttcgctgctgcagccgcagccatgagtatgctcacacctcagaagaggctcatctctagtgtcctccactgtggcgagaagaaggtctggttggacccgatgagaccaatgaaatccccaatgccaacttccgtcagcagatccggaagctgatcaaagatgggctgatcttgcgtcaccgcaagcctgtgacggtccattcccgggctcaatgctggaaaagcaccttggcccgccggaagggcaggcacttgggcataggtaagcggaggggtacagccaatgcctgaatgccagagaaggtcacgtggatgaggagactgaggattctgcgccggctgctcagaatcgaagaagattgatcgccacatgtatcacagcctgtacctgaagttgaaggggaatgtgttcaaacacaagcggattctcacggaacacagccacaagctgaaggcagacaaagcccgcaagaagcccctggctgaccaggctgaggcccgcgggtctaagaccaaggaagcacgcaagctccgtgaagagcacctccagaccaagaaggaagagatcatcaagactttgtcccaggaggaaaaggccaagaaataaaagctccccctttgtctgttattacatggatcagctccctccgttattacatggatcagccattaaaataaaacaagcctttaaaataaataaataaataaatataaaatgaaatataccctcctcacactaaaggcctcttgaccttagttcctgttatctgatacagtgtgtctggatttcaacaaaaaattgcaaggcatgacaaaaggcaacaaaaaaacacaatctcagctgggcaccaaggctcacgcctgtaatcccagcactttgggaggccgaggcgggcagatcacctaggtcaggagttcgagatcagcctggccaacatgatgaaaccccgtctctactaaaaatacaacaattagccaggcgtggtggcgcatgcctgtaatcccagctactcgggaggctgaggcaggagaatcgcttgaacccaggagatggaggttgtggtgagccaagatcacgccattgcactccagcctgggtgacaagagcaaaattccatctcaaaaaaacaaaaaaaaacaaaaaacatgcttttgagacctatcctcccccataaaaatctgtggctgtgaaagtgcagttcctccctgtgtggtgttgggggggctctaagcacccctctaagggagctctggggaacaaaaggacatcctgcccagctagacaacaagaatgagagggtttctccctcgaaattccatggaaagcaggagctggaggttgcaatgggctatgatggcaccaccgctcaccagccttcgtgacagagcccgaccctgtcttaaaaacaaaatgaaacaaaactaaacttttgccagacataatggctcatgcctgtaatcccagtactttgggaggctgaagcagcaggatcacttgaggctaggagtttgagaccagcctgagtaaaacagggagaccccaacactacaagaataagtttaaaaattagccgggtgtggtggcatgtacttgcggtcacagctattcaggaggctgagactggaagatggcttgggcccggaaggtcaaggctgcactgagccatgatcacaccactgcactctagcctgggtaatagagcgagagtctgtctttaaaaaaagaaaagacaacgtagtgcctatagctgataataccatattgtacactaaaaaacgtaagagagcagatgtcaagtgttcttaccagcgtccccccaccaccagcccctggcacacacacatgggagcaaggggaagcttttggaggtgatgaatgtttattactgtgattgcagtgatggtttcggggtgtacgcatatgttcaaactcagcaaattgtatgcattagatatgtgcagcttattatatattaattacacctcaatgaagctattttaaaaataaaaattagggccaggcacggtggctcacacctgtaatcccagcactttgggaggccgaggtgggcggatcacgcagtcaagagattgagaccatcctgggtaacaccatgaaaccccgtctctactaaaaatgcaaaaaatgagccgggtgtggtggcgggcgcctgtagtcccagctactcaggaggctgaggcaggagaatggtgtgaacccgggaggcggagcttgcagtgagccgagatggtgccactgcactccagcctgggtgacagagcgagactccatctcaaaaaaataaataaataaataaatataaaaataaaaattaggccaggcgtggtggctcacacctgtaatcccagcactttgggaggccaaggtgggtggatcacttgaggtcaggagttcaagaccagcctggccaacatggtgaaaccccatctctactaaaaatacaaaaattagccaggcggggtggcaggtgcctgtaatcccagctactcatgaggctgaggcaggagaattgcttgaacccaggaggtgggggttgcaatgagctgagatcgtgccactgcactccagcctaggtgacagagcaagactctctctcaaacaaaaaaaaagaagaagaagaagaaaagaaaattattaaaattaaaaaaaaaaaaaagaaagcaaaaagaaatcccagccaggcgcagtggctcacgcctgtcatcccagcactttgggaggccaaggcgggaggatcacctgaggtcaggagttcgagaccagcctggctaacatggtgaaaccccgtctctactaaaaatacaaaagtagacgggcatggtagcgcatgccagtaatcccagctatttcggaggctgaggcaggagaatcgcttgaacctgggaggcggaggttccagtgagccgagatcgcaccactgcactccagctcaggcaacaaaggtgaaactctgtctcaaaaaaggaaaaaaaaaaagaaaaataaatcccatggaaggagtctaaaattctggcaagcgtcccttagcatggtgtgggcactgtccacaggaaacaacacctcatggccagaacccagctggttcttctttggcctcggtgcgtggacagcaccagcaaggggcaagttcccagtagctgccgatggaactgactcacctttaactaaagtctccagtgaccaggggctgccagggctgggctggccaagcaccacctgactcgcccttgctccatgcccccagctccaggtccagcttgatgcattgtggatgtgcattaaatatttgcataattaaaataaatacatgatgatctgagagtctggcgtgtccagaaggctctggaatatttgtgtcttcttgaacatttggagcagcaaaattccccttcgttgtaactacaactaattgaactggtcttcaaataagtttcttccctaattatccaaggtctgaccccagacacagaggaggggacaggtgggaaggagtgaagcgggtggggaagggaatctagaattaaacatctctggccgggcgcactgcctcacgcctgtaatcccagcactttgggaggctgaggtgggtggatcacctgaggtcaggagttccagaccatcctggccaacatggtgaaaccctgtctctactaaaaatacaaaaattagccaggcatagtggtgtgcacctgtaagcccatctactccagaggctgaggcaggagaatcgcttgaacctgggaggcggaggttgcagtcagccgagattgcgccactgcactccagcctgggtgagagtgagactccatctcaaacaaacaaacaaacaatagaattaaacatctccttccaggccagtgtaacacacattttctgtcatctcaacagttgtgagcattggactcccatggggtcagagggataagcagataggacccctgagggttttattctctgagctatggagaggggaagggcacaggcttagagagcattcgagactctcgacaagcctcagtttcctcctctgtaaaagtaggcaaacgcagggacacatctcacagagttgctaggagctgcctgcatgtgaatgtgctggacccaatgcttcactgggaacagaaaggatctcttgaggagcagggccattgctgcgttgtcctccatgctgttgacggtttgggagctggggtggtggggatgatatgggaggtgctggggaggcacatcacaggatggacaggccagaagctggaagcagaggccgggggaggctgaggccctggctgcagggaaggggagggaatgaagtatcttcagcgggtccaacccactgcagcgggtccctccagctccgatctggggtctgaggacacgtccagctgtttgtgtctacttaggggggagcatttatgactgggcttcaccatctctttccacatcctgactgggcccccgggttctgaggatctgggctgccctggccttttggcagtttctggagctgccatccgctttgctgggattcagaggctccctcgtgccacccagaggaggtaggcaaggccggagccctcactgtccttccctaacctgtccatgccactgtggctccatctaccctgtcattcactcacgggctgagcactcgctgtgtgccaggccctggtgctggccctggagaccaaggaagattcagaccagatgcctgtcctccagaagccccagtcctgagatgggtcaggagggaccacggagttcatctctgcacacctggtgcctagtttctgtgcagtaaacaaaagctgctccctgcccacttgaacgggctctcggggttggcagacagtgcatggatcccccgagtcattgttcctctggcttggatagccctagccgggaggttgtagttaaggtcccagcctgaactcaggctgcccggatttcagtttcacctctcctctttgctcactgcgtgtgaccagggacatgtcagtgaaactctgccccttcctcctcccagcctctaatgtgatggcagggctgcagcagccattgtgtcaccacgagaacagaaggaacctcaggcctcacatccttgaactgctgagccaaggtcatagacacatacccacctctgtactctgttatgtgaaaaaataaatctcttgtgacagcagccactggggtcaggtccacttttgcttggggacagaggtgttcctggctgagacacttaacttccctgtggctcagtttccctttctgtgagttacagataatgacagcagctacctcagggtgcagggctgaagatggattgagataccctgggtgcctagcaaatgttcattatttgatgactgttgttcttcattccagccactcttcgttagatacggctcacagactccttggcgtcctggtcaactttcttatcatatggttttgctttcagtatctctttataggtgatatttggtacctacctttgttctttccatatttcccaaagccacgtagccatgtggtgtttgttgctgttgtttttgtttgtttgtgttgttttgttttgtagacagaattttgttgtcacccaggctggagtgcagtggcgtgatctgagctcactgcagcctccgcctcgtggattcaagtgattttcctgcctcagtctcccaagtagctgggactacaggtgtgtgccaccacaccaggctgattttttgtatttttaatagagacagggtttcgccgtgttgcccaggctggtctcaacctcctgtgctcaggcaatcttgaacccacctcagctttccaaagtgctgggattataggcgtgagccaccacacccgacctaccatatgttatcttttatttatttatttatttatttttatttttatttctttgagacagagtctcgctctgtcaccaggatggagtgcagtggcgtgatcttggctcactgcgacctctgcctccctggttcaagcggttctcctgcctcagcctcccaagtagctgtgattacaggcacccatcaccacgcccagctaatttttgtatttttagtagagacggggttctccacgttggccaggcttgtctccaactcctgacctccagtgatccagctgccttggccttccaaagtgctgggattacaggtgtgagccaccttgcccggccatatgttgtcctttaaatgtaatgaaggtgcccacatttttcgtaagtcaaatgcatcgtgtctcctatgagcttttcatgcactgtcttttatcctttacaaaagacttcccagtggaggttctatttttatctccatttcacagatgaacaaactgaggctcacagaggacaagtgggtgccttggctcctgaccagtagctgctggaaccagacttggacccacatctgcaggtctctggggccctgggcatttcttgatggccccagaggacctattcacctggggagtggtctctggggaggggacagtaataggagtgccagccacaagcaccttttcaccattcactctgcaacttgagtgtgagctcattcacctgatacgtgaggcatcacaaacaggcctggttattgttcccactctacaaatgaagtcacagccatttcagcaggagccctcagagaaagctgtcaagagagacctcagagccaccagggcgacctaggagaagctctggcctaccagggtgcaccgcttggaaggtggtctgagaaggcaagaactgggtctgccctggtcacttggtgcccccagggccttgtatgggacctggtacatagtaggtgctcaaaaaatgtttgttgaacaatgcaatgattccccatgaggcaggagatggtctggatggcagcaggtggcctcagggagcagcagtcagggcacagccccctgactccaaccccctgtctgctctggggcaatgcagggaggacatttcaggtggaattgagtgcaaggttctggaaggcaggaggcggctcagggaagttgtggaggaagggctgggtgtggggtgggaagggactcgggcagaagaggaggttgtgaatgggtcggagagggctccttctggctgcccctagacccaccagaggggcaggcaacagaggagggtgagctggaggctggaggggccagggaagacggacagggagggcgcctgcctcccacagaccccaaccagcctgccctcttcaacctttccctgctgttttccccaggactccttttgccctcacactccagtctctctgtagcaccctgttgctccctcttggtgatccagctcttgaaagcctctccaggcctcccgctctttcggaagccgtgcctctccccctctgcttccttcatctccgagtctttgtacccctgcgtctccgactcggcctttcatctgctccctccacctcggcatcgccttgcctcagtctcccccgacccctgtctcgccccctctgcttccagaagcctgcgcctctgtctctcccaccgcccggtctcctggtgtccccggcgtctctcccgtcgttcccgccgccttgatcagcctgggctgtggcgctggcatcgctggcctggggaccggggtgtgggcgatggaagggggttcgagaggcgcaggggaggggcttcccctcctccgcccctgggcgcctggggagactcgcgtgccagtcacctgccggtcggggcgccgacttcgcgcctacgcactccacgtgggcgccccggggcgcgcctttgtctctcccgagccttgaaagctaattacattgggaggggacaggggtggggtgggagagggggccgctgtccccattcactgagccgaggccgccactccgccggcagccccgcgcaggcctggccccgagtcacgtctgttgaaaccgtttttttcggcctcgcccccacccgccttggcagccagccgcgcctttgtacgcgccggcgggggcgccctggaaccctgaaccgtcttacggggaacgggggtggggggaggggagcggcgcgggccccacgcgaggaaggaatttcctgggccactgcgaaagattgaggctcagaaagccagagagagacgtgcgaggaggaagcggagagggtgtgcgaagctggagagggagtcggagcgccagcgaaagaggggagcgctggggaaggaggaagagaaggagagggggagaagagagacgcggatgctgggcgcgcgacggcagcgggcggaggaggggagcggccgggaacctgcgcgcaggggaagccaggacggagcgcagcaccggcaggggagggttgccgaggggctgtgccgaggagcccgggtgggggcggctggaccgcgggccgcgggactcacagacagtgcgaggcggcgcgggggcccctctccctatgcggggctggggcgcaggggctgggcggggcgggtgggcgtctgagcgcggcgcgggcgcattcttcgccttttcttcctcgggctcattccggccgatcgatacctgcgcgggacctgcccccgccgctaatatctttttaatgagttcgccaggcttaaagcgagcgcgatctgccctccagggtggattttcccccggcagatgtttcgggaggaggaggcgcgcggagctcccgggaggggggacaaatctctccctccgaggggcgagaacaggagactttcttctaaagttcaaaagaaagacgggctttcactcggcccccaaaaatgtatttctcggcggacaatgggcttctttctgcgcctctgagggccggcggggcgggcagggcggggacccgtgcgctttggccccgcctgaccgactcgcacccccctcccccgcacccaggcccgggccccagagcgagggcgcaggagccgcgaagccggccgcccttccgagcgtccccctgaagcgcactgtcgggacctggctctcccggagctaagccccggcgcaccggcgagaacgaaagcgtcgtgcggggccctgggctgtcccacacgcccccgttctcataggtgcctcagccgggccgaagggacgcgcgctggtgcctcaaggggaggacgaacggacctccgggcttgggccgcggcctccttcccctcggcgctccgccctgagcggggcaacaactagaaattagccaaccccgggcggctgccgggccctgagactgtcttgcccgccccggcccagccacccctccgggtcgcccctgctcttctcctccacttccccttcaatgtccctccgtggggccgtcggcctgccgcggcggccctctctccactcccgtgggctcaggggaagagggcacccgggcggcgaggatgacctccgaagagccgcggcaaattgattcgttccgcccggagccggggccgcgtgaatgggggcccgggcggcggcggcagcggagaagaggataaagatgttctccctgaaagggggagggggcgcggagcgggaagcggggccattcactcctggcccggcccctcgggaagccgcgccgaagaaagggggccgaggcctattcaagtcctacgagccgcccacaatggaccgatatactgagggcctctctattaacgcccatgaatattaaagagatcgccaagtggcggccagcgggcgaggggggcgacggagcctgagagctccggcccggccgaggggagggggcttttgcgcgagcacattccgcgcctgggccccgcggaaaatgacaaaataacacgggtcatccgctgggaaagcccggaatgtttcccctcgaaatctcctcccggggagatgtgagcacagggtcttgctccctatttcaatgcaccttgagactgggcgctacctacgggctcctttttccccgggcgggggtccaggtgggttttgccgctagactagaagcacaaaatgtgagcgcggtggagatttgggcgcaccagctgggaggacgttctgcgctccgcttctgcccggctcccagtactgctctccgggcttgcgggtccggaggagaggaatgggactccctggccgcagtccgagcccgtggtcactgcgccagcggaatccaagcctctaactctaagccggggttcaggacccaaacgctgcaccccagcacggaggatgcacagacctgagggcttcccgcagtgggacgtggccctggagagggcaaaatcctcggggttgtcgtggggtaaagtgatcttacccaaagagagaccaagcaaagaaacctcagttcacaaagtccaactcaaaccattgcacagacagggacaccgaggcccagagaggaaaggggcagtccacaggacacacagcagtccttatccccctttggtgtcctggaggaactgaggtcgctttcggggcttgggagctgccgcagcgcttggctcctggcagcgctccccgacgtcgtctccctcgctcctagcactttgtcctctccacctaggtcttcccagaagccaagaagtaggccccggtgaggctcccctgcaggagccatcggactccatacgccccctcagactcgagctctggccagggagccgatgcgacccacaagctgcgtcgaaaaatgagtggagggttcggcgaccctaacccacctccctcctcagcagcgctgccctctgctggcgccctgcccaacggtcctgccttctgccaggtgtgcccttccttgggctccagcctcgggcggacccggacgcagggtctgaaggccagctaccgccgccttcctccctttgcgtcccaacggggacgggggatgccggagactactggcaggaactggggaccaggggtctggagtctggacgccaggtgtgagaccctcttagccaaggcgcgtccgggtggtggaggggcgtctatgccaacaggcgtttggacagggtctcgctcatgggaggtcagctcgctgttcttccacccaagtcctccgcgctgaggagaaggtctagggagtccacacagtccagcggagactaatccgtgagcctgacccacgccgagagggtccaggcacctctgttagcggcatctgaaattgtaggctggtgatgggagccagaagtgcggcaggtggggtgagctccctcacccagcatgtcagggcctggggtccgaggcttgaggctgacactggggagccgcgaagcctgcaggaagcggggccttccgctgggctcagcagctacctgcttcgggagaggggatcgctgggctccgaggtgcctcgaaaccgccgcaaagcaagtctgctcctgggatgatgggcaggaggaatagaggagaggaagggaaagaagagagaggcagaggagaaagaaagaactaggaggcaagaaggaaggggcgccgcaacgccaccggcttcccgaggttgcagctcagcaaggagccggaaagccgggccgcaagccgaacccgcactgaggcctctcgcggagctgcctgcagtttctgagggacttcgctctcaggcacgcctgctcccacctaggaagggtctcgggacccctttcaatccccctatatcccgtaggaaattcttttcccagagacaggctgccagggcgattcctgtccgcccatctcgacccccgacctggccccgcaagggccgggagcctggccttccatgaagctgtctcaggccgggaccagccccagccccgacggccgctgcggccccgcctcggcagccccgtgagcccgcggaggagtttcgcacccgaccgtgcacagcgaccgagttggcgcggcccgtatgaagcgaagcgccggcttcagcagcgcagtctgagcaggggatccgcgtggcaactagggctgcgcgcgagctcggggcgactgtggcggcccggggagtgcagggccggagagggaagaggacgcgggctctggccggggagggagagcggtgcagggctgggccggccagccggggcagcaaagtaaaggtgaacgccgggctgggccaggccggtgaacatagatcaggcctgaggggagcgcggggcccgaagccaggcgtcccctcttgtctagcctggtccctggagtcctagagagcctcgccgcaccccctccccttctccgtcccctcctctcctcagagccggctgagcctccctccctgccctgcgcttcccacggggagagaaggaaaaacaggaggggggaggaaggaccaggaaggggagagaggagtggaggggtactgtttggagcggtccgcgcgcccccgcccctcgcgctctcgcgacgaaggctcctcgagcccagccgggtacaacaagtctgtcctccgacgtcagggggtcattaataaccaattaggagggtcactgcggctcctataaaggcgctgagattttgccaaggggaagacggccccggccgagtgtgcgagaggctagcgcgcgcctgagccccttgctgccgcttccctgcaaccacccgcctctcacccaccctgcaccccccgcacccgcctccgcctccacccgcgtctctccaccctccgcgccgcctttgccatctctacagatttcaccatctctcttcccctctccccctcgttcgctttcctcccagtcgccccctcacctcccgctccctcctgcgtcctcctcctctccgtcctccccctgctctggttccttctccatcgcagcgctctcctctcgccccttgggctcccctctcgcccgcccacctcccccgtcggcccggccgtcccccggcgccggggagctccgggccgcccatgatgggctccgtgctcccggctgaggccctggtgctcaagaccgggctgaaggcgccgggactggcgctggccgaggttatcacctccgacatcctgcacagcttcctgtacggccgctggcgcaacgtgctcggggagcagctcttcgaggacaagagccaccacgccagccccaagacagccttcaccgccgaggtgctggcgcagtccttctccggcggtgagtccagccgtcggagcccggcgcaatccctcctcccggcgacccccattcccgtcctggcgatgcgcgagacgcggctgggatacccggcctcgctgctactcgcgccaacctgggctctcccggcgctcggtgcacctcagtttccccatgggccaaaccaggacgcgagccaccaagcagctccgcagcccacccggctcaaggaccgaccccggcgaccccgtcgctcggccccgacgcccccgccggcccctcccttcccctcctgcgcttgagctggcgggttcccggcatttacagccttactaggcgtgtaatagcagttgactcaaaaagaaggggttttaaattcatttagttaacttgggcttgacccacgaaagttcccacttaaaccaagaactttaaaaggcagccggggctggggagggggtggagggagggcgggcggggagaaaaagccgcggggagagcgagggagagaaagagagagcgagaaaagtttcttttctttaagatgtctcaagttcttattcctcattcatcaacccgcaaacaatatctttccctggctctggcatctctgcgcgtcgccctcttttccccctttacgatttctgttcctctcttaatttaccgtgaagactaattccacttccattcacgctatgtcaaccatctaatcccccttttttgtaaggggaattcctcggccccttttaaacaagtcccctccgcattgagctacaatttactgctacagcattcttccagggctaatgaatttagaattagcaatttctttcgaatggagccgaatgaatgcgatcactttaacagcgtgacaaattgcccgccgcgccgcaatggacaccgtttaacccccccctttcagccggcccgctcgccgggtattttcccaggtagcttagaggggaaccttgtaagacatggaggccgcccttgtgcgcctcgccgcttccagccctgccgcagatgcccgacaggggaaccctcggggagctgggggccgccgcggctcctccccgcccagagagatgacatcggggtttgtctgagcccgggcgccgccctccctggcaccccagggcctgggagcagagagggactcgggcgcgcccggggtcacacagcgagcgcagagcctggccagctgctgccggtgcttctttggcacctccaacacctgccagcccgaggtctgtccccagcgctgatcacggcccggctcctctgccagtgcccagagcctggacacacagtgggctcccggaagccgactaggcgaaagagtctccggttggccttcacctccttgcaggacctggcctcagtttccctgtgcataaaaccgctcgctgccgttggctcattaattcttaaacttatccggggcagaggatggaagaagttgcgaatgctttgagaattcgcggagagactaaaaacccacttctaaaaatgatccccaacgcaccactcgctttccagggcacggagggtctccaggttgcaaacagaggagaggtcgttgagcctccgcacatccgacttcctccacacccgggtggcttctctggatttggggccgacttgggtttggctggtctgggcaggaccgaagccggggtcccggcggggaaggaagggccgggcctcggctgcctcgggctctgaccggttttcctggccccgccgccgcagaagtgcagaagctgtccagcctggtgctgcctgcggaggtgatcatcgctcagagctccatccctggcgagggcctcggcatcttctccaagacgtggatcaaggcgggaaccgagatgggccccttcaccggccgcgtgatcgccccggagcacgtggacatctgcaagaacaacaacctcatgtgggaggtacgcgcgggctggggcagaggggcgcaagggccggcgaggggcgctggtcgcgggtaggactcgggcgtccggccgtcgccgcttccacccgggctgagagcggcggacactcctggcctggacgccccctgagccgggactctaagccgcccgagcctggagctcaccccgcctctaggctcctcccaacccgtgccgaaaatccgaccctccttcccccggacaccctggcagagcaagactgtggttggctccacttggcagatgagggcactgagacccagagcagtcaggtcgcttgcccagggtccccacgcgccatccctccaggcctcttcccagccacttacattctttccctggccccggaagcagcctgggaagcccctcaaggccagtcctgggctgggggtgaggtggggctggaaaggagaatgcctggtgaaagcagaatgacattcacgatgactgtggctgaggtggcattgagtcagcttctgtgtccccagcctgcagtcacggatgacctcagtagcccatgccttactgttcccttttcacggaggctccaagaggcttccatcctaggcctttccacccatcacagtgccagtgccagggagggccacccctgtgcttcttcctaactttgcagaacgggaaacccactgaggccagactggtgcacacccttcctaaactcattccctcgcccgctcccccactccagctccccccggcggaccctggagaagcccaacttgatagaactgcgggatggcccagaggcctctcttgacctcatctccctcctctggagggctggaccactaaccaccttctccagttgctgggtcaggaagttggggtccagtttgacctctgagtggccttggcagctcccgtgaaggggtttaggccaagctggagtgccacagtgacccagccctccctccctggactccaggatcctccctctctgaggcctggctgatgttcccagtgccatggggagcacctctgcatcccttgagagagctcagggccactttgtctgggcagtgatcccttggagaccctcttcttctgggggtagggaggacacggcaacaggagcgtgtatcatggtcagcccatagagccctggagactgatcccctgtgggccacttccagccggctagcttcaggcaagtccctgcacctctccagccttcctttcttcagtgggaaaatgaagctttatccacttcctggggctgttgtgaggatggagagtgtgtgtgtggatgtgcctggaagatggtacacatggcatagccctgccttacctggtccttgatccatctgtgcccaggtgttcaatgaggatggcacggtgcgctacttcatcgatgccagccaggaggaccaccggagctggatgacctacatcaagtgtgcacgtaacgaacaggagcagaacctggaggtggtccagatcggcaccagcatcttctacaaggccattgaggtgtgtgtgtgtgtgtgcactgttgtgtagggaccagccggtaaacccggcggggggaggtgtgcagggcagcggtgtccaggaaccacagtggacagaggggagctgacactggcctcgctggctctgcgcaggccatggggctgtggcagacaggtgggtctccagacatcccgctgtccaggtgtgtgacctccatgggaagctttctgctgcagatcagaaatgatggagctctcaacttgacggcattgggaatgtcacgagcatctccatagtgaggtccccagatgttggctgacagtttcctgaggttcaggggtcacagagacacagagaagcaagatggggagaggcggcccagggaatgcgttggggtgggagagagggcgtgtgtctgcagccgtttagctgtctgatggccctcattctgcatgcatgggcaccagtggcttacggctcatgactccagactcagcgatggctccccgtgtgtcaggcttctcccagatgctggatatgcagtatggtatttaatccccacggggccccaggaggaggattctgtgattatttacagtttactgaccagaaaaccaggtctccctcggtggcagcagacttgggggttttgccggccatctggggggagtgttagcactaatagctgcgcttcctgagccttctcagaggagacagacagggccaggtaacagcctgaacacggtggcttatgcctgtaatcccagcactttgggaggctgaggtgagtgaattgccgaggcgggcagatcacaaggtcaggagatcgagaccatcctggctaacatggtgaaaccccgtctctactaaaaatacaaaaaattagccgggcatggtggcaggcgcctgtagtcccagctactcgggaagctgaggcaggagaatggcgtgaacccggaaggcggagcttgcagtgagccgagatcacgccactgcactccagcctgggcgacagagcgagactgcatctcaaaaataaataaataaataaataaaaataaaaatacaaatacaaaaattagtggggcgtggtggcagacgcctgtaatctcagctactcaggaggctgaggcatgagaattgcttgaaccagggaggcagaggttgcagtgagccgagatagtgtcactgcactccagcctgggtgacacagtgagactccatctcaaaaaaaaaaaggcttggcacagtggctcaagcctgtaatcccagcattttgggaggccgaggtgggcagatcacgaggccaggagatcgagaccatcctggctaacatggtgaaaccccgtctctactaaaaaatacaaaaaattagccgggtgtggttgcgggtgcctgtagtcccagctactcgggaggctgaggcaggagaatggcgtgaacccgggaggcggagcttgcagtgagccgagatggcaccactgtactccagcctgggtgacagagtgagactccatctcaaaaaaaaaaaaaaaaaaaaaaggtaaccggtaaatatcacttcctgtggtgtggcaggggtgaggctgagccaggaaggttcagaggagggtgggaagaggagggtgggaagaggagggcttcctggtagggcagtgcctggtggcagaaaagatccaggtatctggccagtggctgagggtgcaaaccaagcagagacgtggttgccagggcaggcccacactgggaccctccctggacagtgtcctttggcgggaaatctggcccaggagtagagggaagctacccacaggctgctgggggtaggctggtagcaagtgctgtgcagaggcagtcaggtgcttcccaccccacttctctgctccccttggggttgggctagggcttggtggagatttttgggtgttctggaggagcagagagtgaccgacctttagtccatgttccattttctccccaggactcagaccttgaagctctttctaagacccctgggggtgccagggcctagtagcttctcggatgggttcctttggttgtccctgaataacaacaccccagagactctcccagaggtgacagcagggggcctagcctgggtcccagctgaggggggtggtgcttggaggagcaggaggtggaggataagaaaaaactgagcggttcctgaattgggtttgaagtgaggtaagacggccgtggggcagggtgcagagagcactgaaggtagcccaggcccaggacagaggtggctccttgaccatctggctgggccaccacatcctaaaattggcttccagtgtagctgaaccccacatataacagaatgcaccctcccagatcctcaccccaccaccctctgtcacacacatcttcgccttcatacgctctttcccagccatcctgatacagatgtgatggagggctccaacccatcccctcaccaaccccacacgcacacacatacccacacatgtgaacacaagagacagaccagaaacgcctacatcattttggcaagagggctccaggctgaggcagatgtgggggcctgagtctcatctcgctgtgcaggtcacactggctagaagccaaacaaagtcaggaaacatgaatagacacttagaaattcagtccgaaggcaaggaggctgaagaatatcttcagggaagcatttgagtttataggattaggaaaaatggtcatctacatttgatcatgaatttaagttgaaaaaagaggatcaggcagggcatggtggctcacgcctgtaatcccagcattttcagaggatgaagtggatgaatcacctgaggtcaggagttcaagaccagcctggccaacatggtgaaaccccgtctctactaaaaatacaaaaattagccagtcatggtggcgggtgtctgtaatcccagctactccagaggctgaggcaggagaattgcctgaacccaggaggcggaggttgtagtgaactatcagcagcattgcactccagcctgggtgacaaagtgagactccgtctcaacaacaacaacaacaaaaaaagaggatcaggacacacacacacacacacacacacacacacacacacacacacactgtatcacatatgtgatatagacagatccaccaatttggctatcagtgcttttacagagttagcaagccttctaagaaggggctgtctgcgtgaatgacaaggaaataaaatgccacccattttacttttaaagtggatacatttttttgtggtggcagatttctcaaaccattttgtcacaatgtcagattccacttaccagataaattgtgtgtctgggtgtatgtggccaccctcaagatgaggccgaggcccagagctcatgcagcccttctgggctagactggaagatactgctgttccccaggccaatccctggatgacttgggaatcaattggctgtttattctctgcgtgtgggtgagttagccaaggagaaggacctctgctgtgatgttttcttaaactttctgccactcagaactgccactcatagttcataacggtaacccattacttaccaaaaataggaaggaacatctttattcaataagcagaatatactattgctgctctaaaactttccataaatacagaatagcagccttctcaacagagacgaaggcaacggggctttagagcccaggcggtcagtggaggttccgcagcagggcgtgcatctggctggatccactgatgtggcccctggggaacctcctggcttactccagtcacagaatttactataacttcaggtgcctaaaatgacagttctagaaagtgcctagcacatagtaagtggccactaaatgttgaaggaataaaagggtcttagcaacttttttattattattttttttgagatggagtcttactctgtcatctaggctggagtgcaatggtgcaatcttggctcactgcaacccctgcctcccagattcaagcaattctcctgcctcccaagcagctgagattacaggtgtgtgccaccacgcctggctaatttttgtatttttagtagatttccccatgttggccaggctggtctcagactcctgacctcaagcgatctgcccgcctcggcctcccaaagtgctgggattacaggcgtgagccactgcacctggccagcaactattaaaaaatagaatctgctcagccctcggggtgctgctctctgttactatcctcatttttatgacggcgaaactgaaatgttacggagattacgggaagttgctgagctgcgatgggaacctaggcccatctgagccctgagctggagtgctgagtcaccatgccatgtggcctccctggccaatatctatttgctggaactctattaattggtgtgtcgggacatctgtggtacaatggaaattgatgtttgtccagatgacattgagatccttttacactggggtttcagaccctgtggagaaggggagggtatttgcagtctcctgggagcatgttcagtggcaggatgtgaatttacagcaggagaacaaaccaaaaattctgtcatttccaatttataataaaaattcagaaagtggggaaggacagatcttctgggctgatagggcccagagaagcacgttgacagggcatgtccatttgtcaaaagagactcgggcgctggtattccagagttttactgatgtggattttgtggtacaggactcagttcctttgggaattgctttgtttgttttgtgtcctgagcctatccctgctccccagaaaagtgaatgaccagctgatcctgcttctccaagccccagcagagagtcccagccagccaggccaggcctgagtctcagcagtaaagagtgctgccgagggggcctagagggcacggtggctgttctttgcatccaggcggtcagctggcgggaccccgggagcctctgcacagtgatcccagggttccagggaagaagctgcaggttcctgggtttcccgggcttgatagtagaagtttgttgatggcgggtgcctgggagcaggcagacaccagaagcctgggcacggggcacagaagggctgagagagactcccagttcccagcttctgggcagttggggctgctggcttacagctgtctggaaatatgtgtcattctcaattccagcagcctcttttttttttcttttggagacaatcttgctctgtctctgaggctggagtgctcagctcactgcaacctccacctcctgggttcaggtgattaaacaattctcgtgcctcagccacctgaatagatgggagtacaggcatgtgccaccactcacggctaattttttttttttttttttttttttttgagacagagtttcactcttgttgcccaggctggagtgcaatgatgccatcttggctcaccgcaacctctgcctcctggattcaagcgattctcctgcctcagcctcctgcgtagctgggattacaggcatgcgccagcactcccggctaattttgtattttaagtagacacagggtttctccatgttggccaggctggtctcgaactcccaacctcaggtgattcgcccaccttggcctcccaaagtgctgggattacaggcctgagccaccgagcctggctattattttttctttttgtttttcttttctttctttctttcttttttttttttttttttttttgagacagagtcttgctctgtctcccaggctggagtgcaatggcgccatctcagcctactgcaacctctgcctcccaggttcaagagattctcctgcctcagcctcccaaatagctgggactacaggtacatgccaccatacccagctaatttttgtatttttagtagagacagggtttcactatgttagctaggctgatctcaaactcctgacctcgttatctgcccacctcggccccccaaagtgctgggattacaggcgtgagccactgcgcccggcccaatttttgtatttttagtagaaacagggtttcaccatgttggccaggctggtcttgaacccctggcctcaagtgatctacccacctcggcctctcaaaatgctgggattacaggtgagagccaccacacccaaactgtaggctcttcttaactgattttcttgcttttaaaagataatttgtgtgtgtgtgtgtgtgtgtgtgtgtgtgtgtgtgtgtgtatagaagtaatatgtgctcattattttttaaaaagtcagaggcatgatgtagatggcatcatgctactctccatgaactgtaagtcagcattttaaaatagtctcgaaatggcaaacgcttctggggaaagacaagcagcaaaccagcgacagtggctggcatccagagtggcagagagtgactgctcatttcataccatgttatatgtttatacaatgcggtccatatgtctgcatcgctgttttaatttttaaattcattagtaaaattaattttagtacattaaaagcgttcttagtaaataaatgactcacccttatactgcaatagtcaccatcagagttcttattttatttattttttgagatggagtttcactttgttggtcggacagtagggcagtggcatgatctcagctcactgcaacctccgcctcccaagttcaggcgattctcctgcctcagcctcctgagcaggtgggattacaggtgcccaccaccacgcctggctaatttttgtatttttggtagagacggggtttcaccatgttggccaggctggtctcaaactcctgacctcaagtgatctgcccgcctcggcctcccaaagtgctgggattacaggcatgagccactgcacccagcctactgttactgtatttatatttaataatagttgttttcaattaaaattaaaaggccggtgttggcttagtatttgatgacccccaggcctggagcctggaggtggagttcagctgggggcttgctgagcctcccatctcatcccacatctgtgctggaggagttggtttcccttctgggggagatggggctgggaattgcgggtacctgcatgaggctggtgtcctcggagcattcgggcccagcctgtgctcttgctggacactgaagacagaacctcagtcaccctgggcttccaccgaaccagcggcctctgcagctctgctggctcagtgagcactcctgcagggacctggatgcgccagaaaccgctgccagcttctctgagaggttggcgagctccaggaaaaacaatcactggcgcttccatgtctcgattatgcaaagagctttatgcatatgctccactgcaccccaaacaccactcagtgaggccatggcaatgtgaggaaacaggccccacgacgtgaggcgacttgcccgaggtgacttgctcagcagatggggagccctagtggatcccaacatgtctgactccagactgagcaggaaccccctgtggggtgtgttcagtggtctgggggagggtgctgattgctttggaagaaccatgacatcaacgtgtccggtttcatccaagactggaaaccaagggtcaggacaatgttggaggtgacttacaaccagagtcttagagttggggggaaactcagggaccgtgttccctccctgaccccctcatttgaggaacacagaaaggcagagtgacttgcctaaggtcacacatggacctggtgacagagggctcatctgcaccatctcatagacagacttccttcacaattaatttatgttaaatatttcaattccattatctgcttttctgggaggttcacaaaacctcttccttccaccccagtgaggtctggaaaaaaagtagaatttttaaaaatgtaaaaaacaaaaaaaaagctgggcgcggtggctcacacctgtaatcccagcaatttgggagaccgaggcgggcggatcacgagatcaggagatcgagaccatcctggctaacacggtgaaaccccgtctctactaaaaatacaaaaaattagccgggcgtgggtgtggtggcgggcacctgtagtcccagctactcaggaggctgaggcaggagaatggcgtgaacccaggaggtggagcttgcagtgagccaagatcgcgccactgcactccagcctgggcgacagcgcgagactccgtctcaaaaaaaaacaaaaaagaaaaacaaaaaaaaccacgcaaatcagaacctctttcttctctgcccctttccagcaggggcctccagctctgacctgctggcctcctggacagtggccattactgtgaatgagcagagaggtcaccagggatctcgctgtggtgccacattctaatctgtccactttcttggaggcaccgtctaacttcctgtggcttctgggactgcgattcatgtttccacattggcttctcgtcatttactaaccctaaggctcgccatgatgccccgtgaaccatgggggcatgtggaaatggatgtggtgactctaggctgagtctcaggaggatggctgtcacctaagccccctcacactctcctgttcccaccccttttctttcgacctccccttcttcttcttttttttttccttgagacagggtcttgctctgtcacccagactggagtggtcacccaggctggagtgtagtggtgcaatctcggcttactgcaacctctgcctcctgggttcaagcagttctgcctcagcctcccaagtagctgggactacaggcatgcgccaccgcgcctggctaatttttctatttttttgtagagacagggttttgctatgttgcccaggctagtctcaaactcctggcctcaagtaatccacccgcctcagcctcccaaagtgctaggattacaggcatgagccaccacgcccgacctccactttcccttcttttcaggggtgagcagagcttgctgcaatggtctgagggtcttccaggctctgaccagaggaaggaagacgtagtgaacgccagagttctgagtgtgggctctgcaggctgaaccaagcagacacagagggggccctgtctctgaccacagaagccaacgcggggtcctggcctggtttcagacacctctagatggaatcccatgcgatcttttgtgcttcaactaaaaaaggacctgccaggaaaacaaaccagctgttgcctgggggtgtctgggtttctctgggcacatcggatagtggcccccaggggaaggtgccaaggccagcacttctggagtccaggccttgggagagtgataggatgtcccttctctcatacgccctgcctggctagggcctggagcttccccacttgggaggggtaactggcttccataagaggcctggcaggcaggccccttgggatgtcccggagtgtgtggcatttatgatcagtgccaccccagaagcaggccccttacgcctccctggatcatcactgcaaaaccctctgaccaacatcctttgccatgagcctggggcaggtcctccccgagagcatcagagccccaacatcatttgcggggttctctgtcattgacctaggacgcggtgaactggactctgtgtaaggcagtgtaccccaatgtttcctggggtggaggtgttcatccatccgaatgcttcttttttagcatctgccgtgtgcacagagacactcagagccctgtgcttggtcgggaagtacctgtgatgtgggatgcctatgggagctttggataagagatgtttccggaacattatcgcctcagggtatagccaagtaccctggggtgccccacagcccacccttcttggaaacatctggctcagccctgcagccctgggggctggctgactctagttccccggggtaagaatggaaaaggtttctagttttccatctcccattacttctgcttgctgtgaggcgtccactctggtgctgtcagcttggaagcactcctgtggctggagcttggacagagatggcctgggcagggagaggggggcagaggggctcgacaccccagggacttccgtgtttgtgcagcttcccgggacagctcagtggaaatgggactgtgtggctttctcagggctgagactgggtccgggtctcctggctgtggaggggtgctcagagacccccaactctcacctcccagctgcggcctccctgacctcctcttgccttcttccctgcagatgatcccacctgaccaggaactgctggtgtggtacggaaactcacacaacaccttcctggggatcccaggtgtgcccgggctagaggaggaccagaaaaagaacaagcatggtaggtgttccccatggggccgctgagacacagacccatggagaggggagcccagggaggggagagagagaatgagagaggcagagaggctcttggcctccagggaccttggttcaatgtctggcagcattgagcagatcagacatacaggtccaaggaggctgatgcccctggagctgccgcatgggccgggcatgggtgggagatggtcctcctgcttcctggccagaatagactgtctggggggtatgtgggggagaccagagaggcaatgaggtgtgacaggagaagaaaggagctgggcagcaggagcctggattgagttctagttctgctgtacaatcttggaaatgtcctgtgcctcagtttcctcacctgtaaagggaaggtcctaggcaagataatctctaagttcccttctggttctgacaacctgtatatttccttgccctgtcgatgatgtctggtgcagggcctggcacagagtagatgctccgtataagcctgttgaaggaaggcaggacagactgtgcctgtgtgtgtgtcagggggacactgcccatcacagcagagaccatttgctcgacaactatttcttgccaagaattgggctaaacctttggcagatatcatcccactgggtattcataaaacctctgtgtattttttttctttttctttctttcttccttttttttttttttttttttgagactgagtttcactctgtcacccaggctggaacgcagtggcgtgatcttggctcattgcaacctctgcctcccaggttcaagcaattcttctgcctcagcctcccgagtagttgggattacaggcgtgtgccaccatgcccagctaatctttgcatttgtagtagagatggggttttgttatgttggccaagctagtctcaaactcctgacctcaagcgatctgcccactttggcctcccaaagtgctgagattacaggcgtaagccacggcacctggcctgtgaaatttggttatccatatttttattttatttaacttatttttgagacagagtctctctctgtcacccaggctggagtgcagtggcactatcttggttcactacagcctcaaccacctgggctcaagctatcctcccatctcagcctcccaggtagctgggaccacagtcgtgcaccaccacacctggctaattttttaaatttattgtagagatggggtctcgccatgttgcccagctggtctggaactcctgggctcaaatgatcctcctgcctctgcctcccaaagtgctgggattacaggcatgaggcaccgtggtcagcggtccttatttttggaggatgaacctgagctggtgagctactgtttattaagtccttgctctgcagctgatgttttacaaacattaatttctctaggccgggcatggtggcttatgcctataatcccagtactttgggaagcagagacaggaggatcactcgagcccaggagttccagaccagcctggtcaacatggcaagaccccatctctacaaaaaatttaaaagttagccaggtgtgctggcacgagcctgtggtcctagctgcctgggaggctgaggtgggaggatcgcttgaacccgggaggtcgaggctacagtgagctgagatggcaccactgcactccagcctgtgtgacagagccagaccctgtttcaaaaaaataaataaaatctttttggccgggcgctgtggctgtaatcccagcactttgggaggccgaggtgggtggatctcgaggtcaagagatcgagaccatcctggccaacatggtgaaaccccgtctgtactaaaaatagaaaaattagctgggcgtggtggtgcacacctgtattcccagggaagctgaggcaggagaaccacttgaacccaggaggcgaaggctgcagtgagccgagatcgcgccactgcactccagcctggagacagagggagactccgtctaaaaaaaaaaaatatatatatatatatatatatatattttttttttttttaactgatccttaccatgttagtattatctccatttcaggaaggagaaaaccgaggcgcagttccatggtacagagtaggcattcagtaaatgtttgtgggatgagttaatgaaaggtttgggggcaggggtcatcacagttgctcccctttacagaaggctgctccaatccaggcacctctcaggcactggctaaggcaggtcgggtgcttagcgcagagacctttcatagacgtcttttctcatcctctcgggcaatcgtacgcccgaaaaggcagtgctagctttccattttacagatgagaaagctgaggtttagctaggctgagtcgctaagtccccgaggtctcgcatcgcgatcgggagtccaactccctattggaccccccagccggggtacccttcgctgtccctccagtccgtctgccaccgtccaagcagcacccaccctcaaggacggaccggccccgggctgggggcgctgagggcccgggctgcggggcgccggttctaacggggctgctctctccccttctccgtctcccttcccccgccccgccccgccccgcggccagaggacttccacccggcggactcggcggctggccccgcgggccgcatgcgatgcgtcatctgccaccgcggcttcaactcgcgcagcaacctgcgctcgcacatgcgcatccacacgctggacaagcccttcgtgtgccgcttctgcaaccgccgcttcagccagtcgtccacgctgcgcaaccacgtgcgcctgcacacgggcgagcgcccctacaagtgccaggtgtgccagagcgcctactcgcagctggccggcctgcgcgcccaccagaagagcgcgcggcaccggccgcccagcaccgcgctgcaggcacactcgcccgcgctgcccgccccgcacgcgcacgcgcccgcgctcgccgccgccgccgccgccgccgccgccgccgccgcgcaccacctgccggccatggtgctgtgagcgcgcccgcgcccccgccgggccccgcgcgctcctgggtccccggcaccccggccccgcagcgcgactcgccctccagccccaacccccggcccggcgccgccgcggagccccgcgcgctggggttgcgccccggaggcggatctcaggcacccccgccttggcccgtgtcgcagatgaggacactgagggcggcgtccctcacccaggccacgcagctggtgcggctgttcggccgcctcctctgggagggggtccccctgcctggcctcgcccccgagtctccctgctgctgtagagccgggcgcccaggccggcatccccctcgtgggtggcaggagagcggacttagagcccccgagggcccctcagcagaggaaggggagtcccctcctccgccaccgagagtcctgtgcttcggaatgaagggagggcgacctccttgtccgggtgtggtcgggcgcgggggttgtgggggcgccatctcctcttccggcccctgggactggtgtcctgaagtgtcgggagtccttacgcaaccttgacatgtgcgggctactggggtccatcggcagcgggaagagacccggagagatgcatcttctgggcccttctctcctttaggccagcttacccccaaacctggctcctggggacggatgaggaaggagctctttgcagtgcaccaggcacgttgagagtggaggcacaatggaaatcctctgtgggaccccgagcaagaccctgcacctctttgggcctcagtttccccatctgtaaaatgaaggagttggaccaatgccccctccccttcagctgtgacatcgtgcctgggaaggcgaaatatacccccagccccttccaacacacacactccagcgagaggagggcaagactggaaccgctgcccgagaggttaaggtggcttctgtggccacgaagcgcttccgagctgtgcccagtcccgggaattccgcccagtctgcccacacttccctcggtccctgcccgtttcctcaaattcgggccgtgcgcgccctctggtgtcgcctctcacactttgcagtcatttaccaggattcccgtagggcgttttgtaaaataaactataatattaatgaaaagtataaaatgtatagagttttcaagaaactgcgttctacttccagaagatggtcactttaaccttgtaaatatttatctaaaatgatatttacaaaactgtaatatattattatttgattgtatatgtacaactgtaaatacatttgtacctctcttgtattctaaaataaaaattacttggaacatttatcatttagcatctgaatgggtggacacttttatctgtaggaaggaaatatagaaagtgtctagaagctggaaaggggcgggtaagcgttgttccacttactggtgtgtacaggaaaattctctctgtcacaactgggatgtcagagctcagtgagatgggccacagtgcaaagcaaccggaaatcttgaaaggggccaggcagatttctcccggtttccagctggctcaaacatcagtgccttattttgtaacttctcccaaatatttacttttttttttttttttcattttaatggccaactcaaaggagttcaagcagccagtgggaatgggccaaaatggccaccaagtgccctcccaatgcctagactctccaaatgttctgggcacccatttccagaccctcttgaagaagaccagggagcaggaagacctctagttaaagccagagggcttcatggttcctatagggccagtctcacctctcctctccaggaaggaggtgcgtgcaggggagtgtgagttcacacctgtgctccagcatacaccagccatgagggtgtcatcgtccaacccactgggtgtgtggtttcctggcatcccgcagatacaactctgcatcttcatccagcacacgtgtgcacacatgtgcacctgcagacacttgggaatttacacttggacacacagcccagccccacttggaacttcaggggtgtactcctaaagacccccttactttgagtgatttgtcttggaccctggaaatggaggcacaggcagggttggacacctgatgagttcacttgcaggccccatctggggttcactccctcaggccagtgggggaagtcacctttggttctcctcccactggaacctcgcttctcctttgacaccccaccattaggctcccaatgcctccggtggcccctgcattcccccctcccatgcagcccccatccaggcctcttgttcccttgaccaaagcctatctgtcctgagtccccctcccttggatgccaaggggtgaaaaggcaggtgcttttcctgcccacatgttgagactcccaggaaataattctggcttcctgaagtagagcctcccagagtcagaactcagagaggtcagtgaggcccttgaacaaaaatcgaaattgttttctgtgggtcattctgtcctgtgaagtctcagctaacagatccaaggatccccatcccaggctccagaacccacctggtggtagctggctgtaactgcagaccaaggtgcctctggtctgcccacagatctgtttccacagaagtgtgctgccagggcctgggataccagggtgaaaggatgtgacttgtgatttgcacgctggagggaggcatgatgctgaaaagcctaacctcttactttgcttgcatttccagcagaggcctaaggcccctttcctgagattgcagcccccctaatcaaagacatgcaaacacagccatggcagtttctgtgggccagccctgggcttggggctttatttttatttttatttttgagatggagcttcacttttgttgcacaggctggagtgcaatggctcactgcagtctctgcctccaggttcaagcgattctcctgcctcagcctcccaagtagctgggattacaagcacccgccagcacgcccagctaattttttgtatttttagtagagatggggtttcaccatgttggccaggcttgtcttgaactcctgacctcaggtgatccacccaccttggcctcccaaagtgctgggattacaggcatgagtccagccggtcttagggctttaaacatatgtattccagaaatcctcctcacaaacccacaagtggatactaccccccaatcttttcccccaatgctcttttaatcaatgtccatgtgaagtacaacaaaacagaggcatagagagagtaaataatttgccacatcactcattcagtgagtggcagagtggggttcccttcaagtgtctgaccccagaagccacgcctgtgactattaggccacatcacctcctggtcagcccgcagattcagtccaaagggctttctgcatctcccatggggatgcagtgtagtccagcactgtatattgaccttgtatttttcaacctagcaaaactcacttattcattcctgtacttttttgtacattccttaggactttctaagcacatgatcatgttaccagtgaataaaaacacttttacctgttccatcctaattgggatgtcttttatttctttttcttgccttattgcatggtccaagacctccagcaatagaagattctagatagaggccaatgatctgggtctgaaactccactctgccattcactagctgtgtgatcttgggcaagtcaattaatatctctgtgcctcaggttcctcacatgtaaagtggagtgatatttagctcctaaggttgacatgaggatcaaatgggataatgtctatatgtgaatacatacatgactcagtgcttggcacatagtatgtgctcaataaattggaatctttgttaatacaagcatgcctttggcgggtgagaagggtggcagatgctcctaccactcaccccactgggcagcccccagaggacatctgaggcagctgtttgcactcccttccttcagccctttctgatgcccattctttttttttttttttttttttttagacggagtcttgctctgtctcctaggctggagtgcagtggcacgatctcagctcactgcaacctctgcctgctcagttcaagcaattctcctattctcctgcctcagcctctcaagtagctgtgactacaggcatgcaccactatgcccggctaattttttatatttttagtagagatagggtttcaccacattggccaggctggtctcgaactcctgacctcccaaagtgctgggattacagatgtgagccaccgcgctcggccgatgcccactattcttgaatcccttgaactagaggaacggacactctgagtttccagcttccctcctgccttgcaggtggcctgctgggatgtatgtctgtggatgagcagaggaagttatggacagtggcaggttagttgccaggcatggctgtttcttcacaatatgattgcctcaggatagtcagacttcttatgtgtcagctcagggcttcaaaggcaagtgtttcaagagaaccaggagggccgggcgcagtggctcacgcctgtaatctcagcactttgggaggccgaggcgggcggatcatgaggtcaggagattgagaccattctggctaacatggtgaaaccccatctctactaaaaacacaaacaattagccaggcgtggtggcgggtgcctgtagtcccagctactcaggaggctgaggcaggagaatggcatgaatctgggaggtggagcttgcagtgagctgagatcaggccactgcactccagcctgggctacagagtgagactctgtctcaaaaaaaaaaaaaaaaaaaaaaaaaaaaggagaaccaggaggaagtggcatggtctattctgacctagcttttgaagtcacacagaggcatttctgacatatgctgtccatcaaagcagtcagaatcctgtcctgtggcaggagaggatgcacagaacccacttctttttttttttttttttttttttaatacggagttttgctcttcttgcccaggctgcggtgcagtggcacaatctcggctcactgcaacctctgcctcctgggttcgagcaattctcctgcctcagcctcccgagtagctgggattacaggcgcctgccaccacacctggctaattttgtgtttttagtagagacggggttttaccatgttggtgaggctggtctcgagctcccgacctcaagtgatccacaggcctcagcctcccaaagtgctgggattacaggcctgagccaccactcctggccagaccccacttcttgattgaagaagtatgaaaatattcagggacatgcttaatatgaccatagacattgacactgtttctaatactttcagaacaagtgatgctttgatgagcatccttaggctgaaatctgtgtgcacgtctctgcttagaaagtttatgcagttggccaggcgtagtggttcacgcctatagtcccagcactttgggaggcacaggtgggcggatcacttgaggctgggagttcgacaccagcctggccaacatggggaaaccccagctctactgaaaatataaaaattagctgggcgtggtggcaggcgcctataatcccacctacttgggaggctgaggcacaagaatcacttgagcctgggaagtggaagttgcagtgcgccaagatcgcaccattgtactccagcgagactctgtctcaaaaaaaaaaaaaaaaaaaggtttatgcagttatttttaccattttactatttcaatggaacacgaggtgaacccagtaggtagatgaggattgaaccaagagttttgggctagagagtccctgctgcctctgttttcatgtttttcagaatttccttgccagttactttcacctggagttcacctgttccccaccccaactcctcagggtccatggttccctcatttcaaggctcattcaaatgcttcctctgtcaggcaagcttttctgtctgtcctccctctcccttccccatctttgaacatcttagcactttgatgactggggcctcaaatgatccagctctgtggtcccacagcacatagctggtgcccagcaaatgcctgctgaaaaagtttattcatcaattcaacagagatttactgagagatttgttgttgttgttgttgtttgtttgtttgttttaatggagtctcactctgtcaaccaggcttgagtggaatggcacaatctcggctcactgcaacctccacctcccaggttcaagcaattctcctgtctcagccccttgagtagctgagattacaggcacctgccaccatgcccggctaatttttgtatttttagtagagatagtgtttcaccatgttggccaggctggtcttgaactcctgacctcaagtgatccacccacccagcctcctacagagctgggattacagacgtgagccactgcgcccagcagagagctgtttcaagggtcctgaaatctgacatggtatgccaacatggaaatctttgttctagaaacaagaggcagggtgcgccatgcagagccgcacaggaaagcaccgggttggtcaggaggcagagggaaggaggggtaaacatgagcaagagcctttattgtggtttccatgggaaggaatgggtgaggcaaggtaagcagccttaggattggttggtttgaataactgcagtaggtgctggggtttatataagggctttccctagctgtctggtgtctggccttgggatgatcagggcagttggatactggccctgagtaagagagcctaataaaggaggtgtttgtgggtgtgggctctggattgggtggcatgcatttgcaagggacctcctgggtgagttcttcactatctccaggaaccagttaaccctggttggggcagtccctctgggaagagcaagtccccaagatctcaaagcatctgagtacagaaaagcaaaggctctgggcacagtggctcatacctgtaatcccagcactttgggaggccgaggcgggtggatcaccaggttaggagttcgagaacagcctggccaacatggtgaaaccccgtctctactaaaaatacagaaattagccaggcgtggtggcaggtgcctaaaatcccagctactcaggaggctgcagtaggttcaagaggagaatcgcttgagcccaggaggcagaggttgcagtgagcagagaccacactattgcactctagcctgggcgacagagcaggattccgtctcaaaaaaaaaaaaaaaaaaaaaaaaaagagcaaatgcatgcttaatacaagggcctactatatatcaagcatatatacgaaatgggcagtgaaccaaatggacagtctgggtattggtggggctcatatcctgtgggaagacaggcgatgagcagacaagcaaatctgtattttgtaaatatattgtatttttttcaacaaatattttatggctgccctgtgtgccaggcctggatctaagcattgatatatgatgaacagaatagataaagtccctgttttcagcaatgcatgttctagtggggggagactgcaatcaatgaacaaaaaaaaaaaaaaaaagaaagaaaattgaagcccaggcatggtggctcacacctgtaatcccagcactgtgggaggccaaggtgggcagatcacttcaggtcaggagattgaaacaagcctggccaacatggtgaaaccccgtatttcctaaaaatacaaaaattagctgggcgtggtgatgggttcctgtaatcccagctactccggaggctgaggcaggagaatctctttaacccaggaggcagaggttgcagtgagctgagatcgcgccattgcactccagcctgggtgacaagaccaagtctctctctcaaaaaagaaagaaaagaaaagaaaaagaaaaatcagtgacaagaagtaaaacaggatcaagggattaaaaaaaaggactggaaagttattccagataaggtgatcagggaagtcttctctgaggaggtgatgtttgagcaagccatgagtgaggagaaggagccagccacacaaaagcctgggagaagagaattcatgcagaaagagaccagagtgaagggccctggagtgatgagaagcttggtgctgtggaaccgaggggaagccagctagtcttgaggcaggagaatagggtctggaggcagggaacataaggctgattcacactgactttctagaactaaatcaaaaggaaaaccccaactttccacgtccaagtaaccaaaggaccagaggctactccctttgcaatcccagcttttctgtgtgcagatgaaaaactgaaagtacctctgattgctcccttcccactaccagtcaggctggtaggtggccaagtcttcatttgcatgggagtataactttgtaacttcacttcagcctctgattgataactttccacagccaatcagacattggcgtagggtgtaacttttaacttcagcctctgattggccactttccacaaccaatcagactgatcacgggccactccttcatttacacagggcgtacaccaaataaccaatgggaaacctttagagggtatttaaaccccagaaacttctgtaaggagcctgttgagtttctttgcttgagctgttcttgccctgtagagtgtactttcgttttcaataaatctctgcttttgttgctttattctttccttgttttgtctgtatgttttgtccaagacgccgagaagctgggcaccctccaccgttaacagtccggctgcagcatagtgagtaacgcagtgggttaggacgagcgtgaggtcagagacaggcaggagtcaagaagtgctggaagcagagaagtgatttaatctgtttttaaagctctctctggctgctgtgcggagattggatgataggaaggacaaaagtagaattaggaagacaagctaggaggttatctccctggtaagagatgccgttgatcagcctggggcagtggctgcggagatgcacagatgtgtggcatcagtgaatcttagaccttttccgccattgaaattacatagggagttaaaacacgcacagacttctggaccttacctttgcagagccttgtgaaaggcaaataaatcttggggccccaaaatcactaagctaaagggaaaagtaagtcaagctgggaactgcttagggcaaacctgcctcccgttctattcaaagtcacccctctgctcactgagataaatgcatacctgattgcctcctttggagacgctaatcagaaactaaaaatacaaaaaatgcaaccatttgtttcttttttctttctttttttttttttttttttttgagacggagtctcactctgtcgcccaggctggagtacagcggtgcgatctcggctcactgcaaactccgcgtcccgggttgaagccattctcctgcctcagcctcccgagtaactgggactacaggcaccagccaccatacccggctaattttttttttttttttttttttgtatttttagtagagacggggtttcaccgtgttagccagggtagtctcgatctcctgacctcgtgatccgcccacctcggcctcccaaagtgctgggattacaggcgtgagccaccgcgcctggcctcaaccatttgtttcttatctacctatcaccaggaagccccttcccagcttcgagttgtccagcctttccagaccgaaccaatattcatctcacatatgttgattgatgcctcatgtctccccaaaatgtataaaaccaaactgcgctccgaccaccttgggcacaggttgtcaggacctcctgagcttgtgccacaggcacatcctcaatcttggtgaaataaactttctaaattaactgagacctgtctcagatattcggggtttacagcctcaatgcctaaggaatctatactttttacaagccccctgggatgtgctgcttcgtctccgggtacccacttgtctactggtcgtaaaggggtaagtgtggccgggcttggtggctcatgcctgtaatcccagcactttgggaggccaaggtgggcggatcacttgagtttaggagttcgagatcaggttgggcaacacggtgaaaccctgtcttcacaagacaaatacaaaaaattagccgagcctggtggcatgtgcctgtagtccaagctattcaagaggctgaggtggtaggattacctgagcccaggaggacgaggctgcagtaagccataatcgtgtcattgtactccagcctgggtgacaaagactctgtctcgaaaaaaataaaaataaaaaaaggtgcgtgtgatgatgcagaaagaggagcactggggatgggagagggggagtccctgtcgttttggattctagtcccagttacgggtctgtttggggggctcggtggccccaagtgatcatcagggatagcaatgcctatctcgaagatgggctgaaagtgaggaatacataacatagtatttgtaaagcactcagcaaaggaccagccgaagcactcgggctatttctggtaaagggtgcaggctctggggtaaatcgcgtgcagttggaacacacatcggctttgcagccatctgctaatgtgaattccattccttttggggcctcgatttcctcctccataaactggtatccacaatgccaaccttgtgaacgctgtgagaatgcgcggggtaaaggcgacgtctctccctcccgggaagaacttggatggtgtcaggcctacactctcgctccgcctagggccgctcgctgggcctggctccccggctgccgggctacgcgagctcagaggacaccatcgccctcttatggccgcggcaggactggaccgaggggctgggctctagtgccttcctccaggcacggcagagggcgagggtctggcagcccgcttacccagggcctcggggcactagcattcatgtcatcgactgcctggcagggctggctttcttaagtgtggtcgtgagacttgcttaagtggaagaaatgctgtcgctttggagatttataaaacaattggctcgatggatctttcttcaggaggcggacttggtttaccggctttactgaccacagctgatgccaatgatttcatttaatcgtctttagagtccctgtgcatggggagttaccatccccaattagtttcttgtgaatgcagggcaaggagagggagagggtagtgggggacggggagaaggggcgaggggtaccctcctattaaaacggagccgcagaaaaacccacagagacatccgtctgttccccgctgagtccttagaacagcgcctggcacacagagagcgctcaactcgctgtgtaactaaatgcaagccaagatcttcgcattgtgtgtgctcttcccttccctaccaaatatacctggcttgcaaggtttgacctgttttcttagacgatttttaacttgtttccaaaagaaatattggagtaaattagcttgttcaaaggagtccttatgaaaggacagaaccaagtgagaagtatctggagcccggtttggggttatagatgatgatgttgagccagcacccacggggcggccgcaatgtagaatcctggcgctactgggaaccgtgtggaaaggggctcttctttctgttcaaatagtgttttctgtagatcccatctctccatcctcctgagctctctcttacaaaatatcggatttcagcagcttagaattggacagaaactcagaggtccgtttctcaattatctctaaccctggtaaacaataaatgggatgatgagtacaagacagttttggtaaaaagtcacacgccacacaacgtgagattttattattccacgggtgcttccttgccaatagtagacatggcagctcggctcccttcccttcgggttcgccttattgttgccaattgtaaacatggcctctaggccgtgagttctcattggcagctgctctgagtccccgcccttccccgcccctccgaacgcggcctggagttgtggagtcggatatcgcagctcccgactgagctgcgcctgcgcaactcattggcgccaagatggcgatggagatgaggcttccagtggctcgcaagcctcttagcgagagactgggccgcgacactaagaaacatctagtggtgccgggggatacaatcactacggacacaggattcatgcggtacgtggggacttgggggagtcgaggcttcagagagcggcttcagggctctctgcacgtggtccaggcctcgtatccctgtgtgtgtaactccccgcgggacccagggcacttcgtctgagcatcctacacacctcgcttccgagcctcgtgcttcttgctccctgcatcttgtgtgtccccgtctgcatttgtctcagctccctgaaaccctccactcctgacctccggtggctgtgacttttgggtcttctgcctgaagtccaaatctttgatccttccttgtgggagacctggaaagctggggagggttaggtgcaggctcttttccagttttcagctctctgaggggacggtgggcgttcttggctgcctcctcttcagtttagaatccgtaattgttcgatcttagggcaaacagttacattgtgctgcatgcacccatttatacacattttgaatctaaggggtgtagtgcagtgtattgtggttaagagggaaggctcttgagtcagacagttggggttccggtcctgctaccatcacatcttattagcggcattgcctctccacggtcagtttcctcatctgtaagatagtgataataacagtatgatacggtaatgaggattaaatgagacaattatgtaagaaaagaagtaaaaccagccattatatcatcatagataacactagtgtttcaacctttattattattatttttttacttgtatatgtacaaggggcacagcattcatagcattgccctttaacctgttagtttaaggttagtggataccaggaaatttttttttcttttttgagacggagtctgtcttagatcagtcgtgcgatctcggctcactgcaacctctgcctcctgggttcaagtgattctcctgcctcagcctcctgagtagctgggattacaggtgcacgccaccatgcctagctaatttttggttttttttttttttagtagagacagggtttcactgtgttggccaggctggtctcgatcccctgacctcaagtgtgatctgcccgcctcggcctcccaaagtgctgggattacaggcatgagccaccatgcctggcccctaggaaatcttaagattcattctttcattaatgctttcaacatatattttgtgcagttgggttattatggcagagtgaaaaatctctgtcctggtggagttctaacagggagagatagataataagcgcaatgaataagttattcagaatgttaggcaataatgcaatagggaaaaaagtggagcagggtcaatggtatgtggggggaatggtggcaacagggtgggctgtgttttcaatggcacagtcaaggtaggcctgctgcagaaagtgacacctgagcagacctgagtgagaggagtgatgtccaagtagctgtctggagaaggagcactgaaggcagagggagcagccagcacagaagccacgctttgcagggggagcctgttagctttgaggaacacgttgttcttgaagggagagaagtcatttcgagttaccctcgtatcctttctttgtatcttcgccttgcatcaggggccatggaacgtatatgggagaagagaagctcattgcatctgttgctggctctgtggagagagtaaacaagttgatctgtgtgaaagctttgaaaaccaggtgagaacaaaaggtgtgtattccctttcttgcagcatcaggttgtacaaccaggcttttcctgccccctccttatcccccaccccacccctgcctgccctgtcatgctgtaagtctgaggttttgaccatgactgtaggtggggtggtgcagatcagtgcaggcttcagaggtttccccatgttatgtcaccactccaagccttggttacctcctctgcaaagtgagtataatagcatggcctacttcataggattttctctttttttttttttttttttttccgagatggagtcttactctgttgccgaggctggagtgcagtggcgtgatctcggctcactacaaccttcgcctcccgggttcaaacaattctccttcttcagcctcccgagtagctgggattacaggcgccctccaccacgcctggctaatttttttcgatttttagtagagacagggtttcaccatgttggccaggctggtctcgaactgctgacctctgatgatttccccccacttggcctcccaaagtgctgggattacaggcgtgagccactgtgcctggcctaggattttctttagaattcagtgagatggtgcctgtaaagtatttagcacagagcctgatacctagaagcattcaatgaaggttagccccagaaagcaagccagtggggttggaacagagtgagtgagggggagagaaggggcagatgtaagcagagagctgaggtgggcgggcgtgggcctgccttgtagccagagtaagcattttggcttctactttgtgtaatctgggaagcactggaaggggtggagcagaggagggacttgatctggacttaagctcactctggctgctgatgggagattgaagggggatagggcaagcttagggaggtggattagggaccatactcatgatctgaagtgatggtggcttcaactaaggtgggagcagtggaaggtggaggagtgattggaatctacacagattttattttccgagtgtttttttaaaatcatgaaaagctgttgggttttgtattctttgggctttactgtgcataggaccccgtcaactgtgaatagaaataagtttacttcttcctttccaatttggatgccttttatttcctgcatatgttttaagggtagagccaacaggttttgctactggacttgtcctggagcgtgagagagagagaggaatcaaggaactctccgaggtttttggcctgagcaactgaggggatggagtcaccgttgactgagatggggacaactcatcccctatctcggtttgctatggaggactggagggggctgcgggaaagcttagttttgtgcttgatacatttgaaaatgcctgttagtcatctagatggcagagttgggtagctagcagttgagtaggatttggaattcaggagagtggcacagtcacagcacagagtggtgttttaaaggtattagattgagtggccgaaaagtgaagaggtctaaggacttagcctcagcactgagtacgtctcattagaatcgcgggtaaggaactagcaaaggggcttgagaggagcaggcagtgagtaagtggaggagacgtgagcagacttgtgtggttggagtcctggctcagatttcctttctcttcctttggctggtgcagaactcatccatgtgccacaggaaaatagtccgtgtttttcattgtcgtgtaatcgaacaaaatagggtttttgggctaaatgaactacttggaatggtgatatgtctaaggatagttaatggagactttatacgtggaggaatgtttgaagttagcagtttctgaaagtaagtccagacaatatagttacatgaatttgctgaatgtggcgcctgttccaggctttcaccctgttgaaccgacatctcaaatggtgtgtggtcttgtcagaaagtctgctcacagatggatgaaccccttgtgttttgtctttcagatacattggtgaagtaggagacatcgtagtgggacgaatcacagaggtaacgtcgatatcagattggtgtttacaaagtcgaggcaggctggcgatttcattcatgggacagtcattccacttgtagttacatgaaaaaggcattcattgcatttggccgttgtgtggcttctgatgtaaatatgtggcttgttcgatttcagattactggttcatgtttttttttttttgagatggagtctcgctctgtcgcccaggctggagtgcagtggcatgatcttggctcactgcaacctccacctcccaggttcaagcgattctcctgcctcagcctcccaagtagctgggattacaggcacccgccaccacgcccagctaatttttgtatttttagtagagatggggtttcattatattggtcaggctggtctcaaactcctgacctcaagtgatccaccagcttcggcctcccaaagtgctgggattacaggcgtgagccaccacatctggccttactggttatttatgatatgacacatgaacatggagcatgtgtccaggtgtggaacttggcttataggttcaacagaagaggtggaaggtggagaccaactccaggctggattcggtcttgctgctctcgtccatgaaccttcctggaggagagctggtaagggctacagctggggccatggactagggcccagtgggctggggggagccgtgggaccctttgttccaccagaggactttgatttacactgaggttgcccctttgactcctgtttgtctgctgtgaagtttgctgcctagatgtgtatgtagacttttcaccctgtccaggtctcccgaaagagggagcagttggcatatggtaggatcagaaacatccatggggtgggatcccaacagagagttggggagagaagcccttagatgctggttgttaacagttttcctttttggatataacagccttgcatagtgaagatgttccttgaaaagttgtctttacattaggtttttgtgaattgaaaggcatttcattcaaccatgtgtggaatgtggttgctggcattccagacaaccacagtaactaagccacagccttttgtaaaatgccatggttcaccttgatcttcagtccagcgtgtatttacagagaggcttactgtgccaagctctgtgccgagtgccaagcacgattgagttccccagcaggggatataagataactgacctagtccctggcagtagaagaataaataagctgtggttatacaaaaggaaatttcagtgagagaagcttgtaggaaagacaggcattggagttgatcctggaaggatggagagactttgaatgactagttcagggaatctgagataaagggaaatgtatgagcagagatatatccaagcaggagttagtctggtcctgctggaccacagagggctgtcatggaagatgactatggaaatgttggctaggtgagattgggaggggtctgaatgttcctcagagaagggagggaaagaggaagaggagctgtggaaaagtcttttgagatggaaagtcgtgattatcactgattcccctcaagtggcttgggttacctactcttgctatagttctcagtgcttgaatattgtggttggcctcaaacatctcaaaaggaagtgaaagagaagtgatggagacctttctgaggatctggcttaagtaatgtcatttctttgtgtatttcagaggagaagatctgcagaagatgagcttgcaatgagaggtttcttacaggaaggggaccttatcagtgtatcctgcgctttgcactccagcctcttgatgcttttctgtgggactgggaaatgggccttccattgtatgtctctgacggaagaaccatgtcatccttgcagggatccgagtcttagaccaagtgtcgggctctgctgcatcctttctcagtctccttaattcaggctgactccccagctcttgttgggacctgctgctaagtcatttctttgggtcttgtaacttacggtggcctgtgctttagactaggcttttgttaatggtgttaacttttagcgcagggagtggagaaggtgttgttcacgtcaagatattaatgacaggccgagtgtggtgactcatgcctgtaatcccagcgctttggaaggccaaggagggaggactgcttgagcctaagagttcaagaccagcctgggcaacatagcaagacccccctctctacaaaaaaattaaaaaagaattagccgggcgtggtggcacatgcctgtagtcctagctactcaggaggctggggccagagggttgcttgagcccaggagctcaaggctacagtaagctatgatcacaccactgcattccagcttgggtgacagaacaagactctgtctctattttatgttattttttaaatttttctttttttttaatgacggagtcttgctctgttgcccagactggagtgcagtggcgcgatctcggctcactgcaacgtccgcctcttggattcaagcaattctgccttagcctcccaaatagctaggattaccggcgtgcgtcatgcctggctaatttttgtatttttagtagagacaggtttcaccatattggccaggctggtctcaaactcctgacctcaggtgatctgcccacctcggcctcccaaagtgctgggattacgggcatgagccaccatgcctggcctctgtctttattttatttatttatttatttatttatttatttatttatttatttttttgagacggagtttcactcttgttgcccaggctggagtgcaatggtgggatctcggctcactgcaacctctgcctcccgggttcaagcgattctcctgcctcagcctcctgagtagctgggattacaggcatgcgccactatgcccgactaattttgtacttttagtagagacggggtttctccatgttggtcaggctggtctagaactcctgacctcaggtgatcgacctgcctcagcctcccaaagtgctgggattacaggtgtgagccaccgcacctggccttctgtctgtatttttaaaaaaaagatattcatgacaaccaaggggagaggtaaggtcacagtgatgtgctctgggtcaaagattgttgagcctggaccattggagaggggaggaaaagatggaggtgtggggtcaaggggagaggctgcagaggacaggacagtgtgtggccaaggctgctgtttgttccttcatcaccctggccaggctgaggtccaggcagtgttctctgacggagctgtctctttgcacacgaggagcctgaaatatggaaaagtaagtcgggctcttgatgttcctgtttgctgactgagactacaaggctatttttgaatccccatagctctctggaattctggcctaaagaaccccagtagctaagcattaatagaggctggcatcccacaaactgatcgtgttccttaaacgtaacatcaggacggtcagggttcacagggtcatgggtcagtagccttgtaaagaacaagttttatcctttttctccaaggagactgactttcaccagaagagcccctccaactgtgggctgggaggtgcagctgtctctcttcctccagggggcgctgcagctcagcactggggctgaggctgtcctgggaacaaaggcaggctgggtctggttaaacagcccttagacaaacgtccaatcagtccagtggatgttattgctggcaaagcttgctctgtcatctgagcctctaaatggaatttcactgcttttcttgtacgaggttgcattattgaagctatttactattttaaggagagcatacttcctaaaacaaattaggatttactagtctcttagctttatctgggtgaacgtttttattttctgagtggaacaaaaacctcttcccttaatggagtggctgcagacagccacgttgatgtacatggagtaggcagaggactgctgcagtatgctgactttcacaaccctgggtcctgcggactcttccttggcaggacgtggacttgagctgtcctgccaggaccagacatggatttgcacccagctccacccatctccttacctacccagaggcacacatctcacaggcaagatgagtgtttggggttcaggtatgagctagggtcatggaacaacgcagtgctcctgggccagcaggaggctccagctcacttcctcattggcttcagcttctctaatgtctggcacatgagttctggcttagagtgcaaggaagactgcaaagggaaatgacagagaagagtattgaaggtcaccttctgctgggatgtatgaatagcctctgagtcccaaagcgttctctgcaaaaatgtgtactatgtgtatgcatgtaggcgacagcaattataaacaggaaggacaccaatttgaatatacttaggatgtatattctgtagtctccttttcattcatcccgccaatcttgcagtgacctagcttcgtgatatatttctttagctaggtcagggggttttggtccaggtttccccctccctggtgaaacggcagaagacccactttcatgatttgccatgtggtgcctcagtgattctcggtaacaacggcttcatctggatttacccaacacctgagcacaaagaagaggaagcagggggcttcattgcaaacctggaggtgagcaaacactgtggccattttcagtgggatggagggggctcagtctttgctgtgtttttgtggccagtgaagttggttgtttttagctatgttactggtgtaggctgagtcactttgactttccatcacggtatgttcatgaagcccatattatcttctcttctaaggagatgaattcagtgaatggtttggtgtttgttggtggaggtggcaaagttgcagggtaatagccgaagagccagtgaagaagccattctttttctgtttttttgtttgtttgttttgttttgttttgttttgagacggagtcttgctctgtcgcccaggctggagtgcagtggtgccatctcggctcactgcaagctccacctcctgggttcaagtgattctcctgcctcagcctcctgagtagctgggattacaggtgtgccccaccatgctctgctaatttatctatttttagtagagatggggtttcaccatgttggtcaggctggtcttgaattcctgaccttgtgatccacccgcctcggcctcccaaagtgctgggattacagacatgagacactgcaccctgccccattccttttaatctcccttggaattagctgtttggttgatttggagttccagggtgatactgtctgagtcataaatgatttatttgtgaatttctgtggctggtcacgtattttggtcctgtttgtatttcccttcccctctctgtgtctccttatagcctgtctctcttgctgatcgagaggtgatatcccggcttcggaactgcatcatctcgctggtaactcagaggatgatgctgtatgataccagcatcctgtactgctatgaagcatcccttccacatcaggtactctccccagggcctctcccttcttcactgatctgtgagctgctctgttgtttgttcagagacaatatgcacatctccccaatactttcccaacatccgtcagtatgaactggcctgaaacagccttaatgagtgtctggtagatctttccctaagaaacttgcaatattctcaatgcctagtgtcagtctaaggattttggggcaggaggtgtcaggtgggactagtttatgagagcaacctctggactacatcttacctctcccaaatttcagccagcttttggatgaatgtcagaataatatctttgttcttgtcgactatatcccagagcatcttgctgatttattaggctgcttctagcagatcatatcttgtaacgcttagtctctgagacatgaaaggaatacagaaagtttatgttaacggcttgatttatgtttggattggcttggtggtctgtttatggttggtttcttttctgaacaaatgccttttccctttttcagatcaaagacatcttaaagccagaaataatggaggagattgtgatggaaacacgccagaggcttttggaacaggagggataaggaggtgctccagaagcacgggactgtggaccttgcaggagtgaagactgtgatgtgtggtccccatatgtggctcagcaaagactcgagagatcatccctttgtctgcattgacggccctgtgacggcctccagcccacaggcctgctttctcctgtcctaacaccaagcctgggtggcagatgaacagtgcttccttgggttgccagctgagtcccggtattagggaatagtttcagctctttcaaagtgcacagtgttacagtcgaatgggctcccatcctggaataatatggagaatcctttgtcttccactcactgtcattcacaaggcacagtgccccatgaaattgccccaatagaaaacatggcatccctgacctccaaatggtctgttttggcctccattcctatatcctttaaatgactgagaatgcagctggtaaagttggaagaataaagttaaccaagcaggccaggcacggtggctcacgcctataatcccagcacttagggaggccaaggcgggcagatcacctgaggtcaatagttcgagaccagcctggccaacaaggtgaaaccccatctctactaaaaatacaaaaaattagccaggtgtggtggtgtgcacctgtagtcccagctatttgggaggctgaggtgggagaatcacttgaacctgggaggcggaggttgcagtgagctgaaatcgcgtaccacactccagcctgggtgacagagcgagactgtgtttcaaagaaaaaaaaaaacaagcagccttttgcttggttggaatctgattttctgttgcgtgttccttgtagccatagatgtgattatgtccacaccgggctgccttaatctgtcctgcttggagagtgacttgtaagatgctgaattattcatgataatacagtgaatgttctgggtccatgtactcagataaacatgaagaaaataagcaaagaaaaatggagactgggaaagcaaagctgttttcatcctataattgaagtagtgtggagcattaacttgtggatgattcagagttaaaagataaaaagacgccagagttctcgctgaagaatgtgagaattcctgtgcattgttttttctgatgactatctaaaaatggtgccctgatgtaggtttgggggaacattcttaaaaacaagggtgctatgtgcctgtaatccagcactttgggaagctgagtgggcagatcacctgaggtcaggagttcaagaccagcccggccaatacagtgaaacctcgtctttaccaaaaatacaaaaattagccgggtgtggtggcacaagcctgtatgtagtcagctactcaggaggctgaggcatgagaatcgcttgaattcgggaggcggagttgcagtgagctgagatcgcaccattgcacttcagcctaggtgacacagtgagactgtctcgaaagaaaggaaaagaaaaggcggccggacgtggtggctcatgcctgtaatcccagcactttgggaggctgaggtgggtggatcacaaggtcagatcgagaccatcctggctaacatggtgaaaccccgtctccactaaaaatacagaaaaaacaaaccatagcctggcatggtggctggcacctgtagctctactacttgggaggctgaggcaggaaaatgacgtgaacccgggaggtggagcttgcagtgagctgagatcgtgccactgcattccagcctgggtgacagagtgagactgtctcaaaaaaaaaaaaaaaagggacactatatgcaagcgctgtcttcacatatgtggcaaacttgtttgtttgtttttgagacagagtgtcgctgtgtcgctaggctggagtgcagtggctcgatctcggctcactgcaacctccacctcctgggttcaagcaattctgcctcagcctcccaagtagctgggactataggcatgcgccaacacgcccagctaatttttgtgtttttagtggagatcgtttcaccatgttgagcaggctggtctcgatctcttgaccttgtgatccacccgcctcggcctcccaaagtgtttggattacaggtatgaaccactgcacccagccatattttttgatatttatagacgtcttttttttttttgtttttttgagacggagtcttgctctgtcaccaggttggagtgcagtggcgcgatctcggctcactgcaacctccgcctcctgggtttaagcgattctcctgcctaagcctcccgagtagctgggattacaggcacgtgccaccacgcccaactaatttttgtatttttagtagaggtggcattctaccatgttggccaggatggttttgatttcctgaccttgtgatccccccgcctcagcctgccaaagtgctgggattacaggcgtgagccactgagcccagctatagatgtcttaacatcattgttttctgttcttttgttccgggtaataataaggagctgaggacagctgaggaagggcttggctgacaaaatgccttccgacagagccctaactactccacgtaaacctaggacagtctcaatggtagtaactttgaacactgcatttgataactttcaaatacaacttggctctttttcattaaatggtatgcttctctataacaacacaataaacaacttcttacctcactttctttttttgagacagggtctcactctgtcacccaggctggagtggggtggcatggatcacagatcactggagcctctacctcccaggctcaagtgaacctatcttagcctcccgagtagctgggtccacaggcatgtgacgtaccaccatgcctggctttttttttttttttttttttttgagacagggtcttgctctgtcacctaggctggactgcagtggcacaatcacgtctcaacctcctggtctcaaccagtttccaacttcagccttctgagtagctgggactacaggtgctgagccaccacatccagctaattgtttttgttttttgtttttcggcagagatgaagtctcactatgttgcccaggctggtcttgaactcctgacctcaagcaaccctcctgctcaagccatcttcccaccttagcctcccagagtgttgagattacaggcatgagccaccacacgctgcctattttttttatttttacgaatttttttgttgttgcccaggctcaagcgatccacccacctttgcctcccaaagtgctgggattatgtgtgtgagccacagctcctggcctctttttttgtttttcctatcccaagttgtattactagttttggggagtttgcagacaattgaatattctataggctgtgttgcagctttagatggatcgacctgtcatgtttttgaggttatccaggctgtatatctctggagagaagggaatggcaaagagtgggagtctgagtcaagtttggttttgtttttttaagagacaaggtctctgtaatccaggctgcagtacactggcatgaccatggctcactatagacttgggctcagccaatcttcctgcctcagcctcctgagtagctgggtttggttttccccagggccatatgtcagcttatttaccctcctcacttggtgtctcccagcctgccagcccatgctgttcatccagtatctgctgaatggtgattacctattaagtggaactaacacaaaattgcttatctaaaagcaattattggtgattatttccttgcagtggcccactagagggcgccattgttaagtgtaattccagtaggtgttttgtgttttttttttttaatggaataaactgaaatctttacatggtactgaatccctttagcaacttggggggttgctttaactgaatcacttttaatgaagatatatgaacttgaagggatttattcaatatatgacaatattactcaatattacttttttttttttttttttttgagacaaagtctcgccctatcccccaggctggagtacagtgacgggatgtcagctcactgcaacctccgcctcccgggttcacgtgatactcttgcctcagcttcctgcatagctgggactacaggcacccaccaccacgcccagctaatttttttgtttgtttgtttgtttgttttcctgagacggagtctcactgtcacccaggctggagtgcagtggcgtaatcttggctcactgcaacctccacctcccgggttcaagcgattctcctgcctcagcctcttgagtagctggaactacaggcacgtgccaccatgcccagctaattttgtgtatgtttagtagagacgaggtttcactgtgttaaccaggatggtctctatcttctgacctcgtgatctgcccgcctcagcctcccaaagtgctgggattacaggaatgagccactgcgcccagctgaatttttatatttttagtagagatggggtttcgccatgttggtcagcctgctcttgaactcttgaactcaggtgatctgcctgccttggcctcctgaagtgttgggattacaggtgtgagccaccacacccagccaagcaatatttatttccgattgtcaggcatttgccaggctttggattctagtttttaagcccttaacagtatcattcagggcctatgttctcaggacctcttgagactgtgcctcggtttttaaaaaaagtatcattctacagtattatacaggcatttttaaagtacagtgcattggccgggtgcggtggctcacacctgtaatcccagcactgtgggaggctgaggcgggcggatcacctgaggtcgggagtttgagatcagcctggctaacatggggaaaccccatctctactaaagatacaaaatgagctgggcgtggtggtgggtgcctgtaatccctcaggaggctgaggcaggtgaatcgcttgaacccgggaggtggaggttgcaatgatccgggatcgtgccactgcactccagccggggtgacagagtgagactctgtctccaaaaaaaaaaaaaaaaaaaaaaatacagtgcatctctagaaaaaaatactagagtctgggcattgggcatggggctcacctaaaacaagaaaatggcaaagtggaaaactagggataaggctttagatcaggtgcagctgacctctgctgtgactcccaggaagcatagtcccaatctttgtggaaaaccaaatgagatctagtttgatcctcatgaaccctgtctctacaaaacaacaacaacaaaaaaacgtaggtgtggtggcatgtccctgtagtcccagctacttgggaggctgaggccagaggatcaccagaacccagaaagtcgaggctgcagtgagctgagattgtgccagtgcactccagcctggccaacagagtaaggccctgtcttcaaacaaacaaatcaaattaaacaaaaaacccaaaacccttgtaaagtaagctatgacctccatttacgggtgaagaaatgaactcagaattaaagggacttgatgaagcccctttgaattgtgaatcaatgtagatttaagctctagggaggtgtcataatgcagtcctttagaggatggactggactgactgaaagtttatggacccagaaatttaattccagcattgaggctgatcttttgtttggattgttattttgcttattgcccatccttccatgtaggttccatgaggacaagggtgggtttcttcccccaccactgtgtctcagcacctaaagcagtgcttcacatacagatgttcaataaatgcttcttaagtgaattgttatttattttttgagacatggtctctgtctcccagactggagggcagtggcgcaatctcagctcactgcatcctctgcctcccagactcaagcaattctcctgcctcagcctcccaagtagctgggattacaggcatatgccaccacgcccggctaatttctgtatttttagtagtgaggggtttcaccatgttggccaggctggtctcaaaactcgtgacctcaagtgatccacctgcctcggcctcccaaagtcctgggattacaagtgtgagccaccgcacccggccatgaattgttagtttaaaaaaatgtgtattaggggttctgatttgactgctcaattttaagctaaactagagaataaagcatgtgcgcggtggctcacacctgtaatgccagcactttgggaggctgaggtgggtggatcacgaagtcaggagatcgagaccatcctggctaacacggtgaaaccctgtctctactaaacatgcaaaaaaaattagccaggtatggtggcgggctcctgtagtcccagctactccagaggctgaggcaggagaatggcgtgaacccgggaggcggagcttgcagtgagctgagattgcaccactgcactccagcctgggcgactgagcgagactccgtctcaaaaaaaaaaaaaaagaatctggagaaaatgactaaagtatgaatgggaataaaaagaaagcacaatctccagaaggaataattaggatataatcaggataagataatgggtaaataggccaagtacaatggctcatgcctgtaataccaacactttgggaggccaagagggcggatcacctgaggtcgggagtttgagaccagcctggccaacatggtgaaaccccatctctacaaaaatacagaaattagccaggtgtgtggcatgtgcctgtaatcccagctacttgggaggcaggagaatcgcttcagcctgggtggtggaggttgcaatgagcagagatcgtgtcactgcactccagcctgggcaacagagcaagactgcctcaaaataaataagtaaataataaataatgggtaaataaagcagaacaagggcattcacagttgaagaatgacactacagatcagaactaagattgtcagccagataattttgtgagagaacaaagctaaaccaaatcacatctgaatttataaattccagttctaaatctacgcacaatttttcatgttttccattccgtaccttccaagtaactaattcctcttgaaaccagtatcaaaaataagtgtcatctttcaatgcgacagaaatatttctaaaatacttaatataatagctgaatgtacaacactcatcgtgcagctgttcctccgatatcagtagcaacttgtgaaaaatcagtggtctcagatcaacaggtttttgatactgaatggtacagtgggaaccatgggttttggagcaaggtcagtctgggatgaaattgtgactctgtcacacattggccaagtgaccttgggtaggtaagtcacatctctgtttccccatctgtattatggggaatagtattacatgcctcactgggctatagtgaggattacatgagataatgcagtttatggaaagtgtaaacagtgctcggtgtaaagtaggagctgtgataagtggatccctccttagaaatgggatctcgggccaggagcagtggctcacgcctgtaatcccaccactttgggaggccaaggtgggtggatcgcttgaggtcaggagttcgagaccagcctggccaacatggtgaaaccctgtctctactaaaaatacaaaaattaggcacgtgtgatggtgtatgcctgtaatcccagctactcgggaggctgaggcaggagaatcgcttgaatccgggaggtgaaggttgcagtgagctgaaatcctgttactgcatcgcagcctgggcgacaagagcaaaactccatctgaaaaaaaaaaaaaggaaagaaagaaggaaagagaaggaaagaaagaaggaaagagaaaggaaggaaagaaagaaagaggaaaaaaggaaaggaaaaggaaaaagaaaagaaagaaaaggaaggaaagggagaaatgggatgcctgtcaggtgcagcgctctggggaggcgtggagagcctataatagggaccaaggtgctttttagtcgcagaacatggattatttgttaggtgtggctttggcacatctaggtcattggttctgccgacttgctaaacccaaccatctgggcattttctcggctaatatagaggatgttttcatgtgaacacgtgtccacctgtgaaatgtttataatgttaaaggttcgttctggggcaaacatctgatagcgcctggcaaacccaacaaatgccttttctgtaatgagtaagcctcctaatgcccaaagaaacagttgaattcgttagcaacatgtcggatgttttccctatgtctgtatatttcttcgctagtttttttttttttttctttttgagacggagtttcgctcttgttgcccaggctagagtgcaatggtgccatctcgcctcaccgcaacctctacctcccgggttcaagcgagtctcctgcctcaacgtcctgagtagctgggattacaggcatgtgccaccacgcttggctaattttgtatttttagtagagacggggtttctccatgttggtcaggctggtctcgaactcccgacctcaggtgatccgcccgtctcggcctcccaaagtgctgggattaccggcgtgagccaccgcgcccggcccgctagttctaatatttatgctttttggagggtgaagggcttgaaaggcatcaaaaaccttggtttctaggagcgagccaaattttctcccttagagactgaaggaggttatccgactccgcttccaggaaaatccaatccgcaatttttccctcgctttggctcttccaggtctcactactcgcgccggggagacgcggtccggcctacgctaggccggcaagaatctaccaggtcccaggagggcggggccgagccccagaagtcggggcccgggccaggagtcttggtgcaggcggactcgggcgcgtgccatgggaccacaactcccggcacgcaccgcggactgcgccgaacacggttggctgggagatccaaccctactgctcccaccggccaatgggacggaggaaagaggcctgacccggattctcggaggccaatggcaatacagaggaggcgggtgcttccttaccactcaccttgcgctcagagaagccacatttaaaaggtcgtgccgggccgggctttcgcaggcagtgggaccagagccgggaggggcggcggtgtcccgggaaagcggctcttggggcatccgggtcccctcgaggcgggctccggacgtcgccgtgggcggggccgagggcggggcctggcctcgttgtggagcggctcgtaatccatcatggcggccgcggggtttggtgtctgtgcctgagcagcgctggagccggagccggttcccgggtcctgcggctgaggagcccctccgctgtccacggcccctaccggcggggggcggctgggtccctcggcggagctcgggagatgtgactgcctgagggcggtggtggtgtcagcgtccggggccgggggagggggtgtctcgggcagagacccccgggcttggggcagctgaggcggccgggcctcctctacacggggcccgccttccgctgtctgggccgcgagagtccttcgtcccttacagccccgccccggctttgggacactgcgggtggtctgtttcccccagcttgggacaccccgttttctgaggcgtggaagagcgtcgccccggagtaagctgcccgtgccgcgccccgacagcttccctcagccccaagccgccccttattccggatcccggccccaactttggccacggagcctcccattcaaatccctcccttgctgtcaaggggtctccccttcccccaaggtggctcccgcgagcctctaatgccctgacttcttccaatgtcacctacggcccccttagtctcagctcagccaaaaactttaatgcaaaggaaaagtctggattggttccacaggccttttaaaaagcggacttaaaagttgctggcaatgcattccttttcgtcagagtcgagggcaaactcgctgaaatctgggtgacccgtgtccttttccggagagcaaagcagagaagcgagagcggccactagttcggcaggaaatttgttggaagatgaagaagctaagatagggggttggtgacttccacaggaaaagttctggaggagtagccaaagaccatcagcgtttcctttatgtgtgagaattgaaatgactagcattattgacccttttcagcatcccctgtgaatatttctgtttaggtttttcttcttgaaaagaaattgttattcagcccgtttaaaacaaatcaagaaacttttgggtaacattgcaattacatgaaattgataaccgcgaaaataattggaactcctgcttgcaagtgtcaacctaaaaaaagtgcttccttttgttatggaagatgtctttctgtgattgacttcaattgctgacttgtggagatgcagcgaatgtgaaatcccacgtatatgccatttccctctacgctcgctgaccgttctggaagatcttgaaccctcttctggaaaggggtacctattattactttatggggcagcagcctggaaaagtacttggggaccaaagaaggccaagcttgcctgccctgcattttatcaaaggagcagggaagaaggaatcatcgaggcatgggggtccacactgcaatgtttttgtggaacatggtgagtgcttttcaaaatttctgctcatggttttcctcatgcattcatcttaggccttcaaggaactttgaacaacagtacttgcgacagttccttccaattccacttaataaatttgttactgtagttatctcttagtggaactttctttgtataagaaaaagttacttcgtgacttcggctttattcaaaatctatttgagttgcttatttcttgcctgattcctctgctaattcactgttgaccttggacaagccactttactgttccagggctttagtttcctgaggggctggacttcagtggtttcttagggtccctggttctatgattctgctctaaccgaagtcgtgggctcttctgacaagcatggattctttactgctttgtctacagagagcttttatcatattctcaaagtggtttgtgttcctgagaaagttaagaatcatagatactggttgacgctaatatccttgaccttttccttcgtaagtaggacttgaaaatactcactttggagccatgtgggaaaaatcaagtggggaagcagcattccttgtgaattttagatagacagcttctgtcttaccttccataaggagtaatctcttcctcgttgatgaagctttcatcctgtcttctccctgtttagaatgatatttgggccaataaaggttatctgtgacatttttatgaacatatttggcatttgaatgctgcccgtacattttatgttgttcatgtccagtaattctgtgcgaagttaaagctaagggtcggcttacactgatgtctataaccagttaattagggttactgtttgtactgttgcagcctgacattttttggattgtgtcctttatattaaaaaatcagttgagcccacctatcctataagcaaacgtatgaagtgtgccagtggcttatactttgaaattcattcagaaataccccaacattgggtgactgcagtcaacaaaggcttctgttggatgaacttgcatttgacagctgaagttttactttcttacgggaaaatattcacttcatctaaataaatccgggtgcttggattttactttgccttgaaacattagttctattttagctttgtttttaggcaggcaaatatggtaatgtgttgttatgatggttcccaaattcaggatttaaaaagtgaattatttacattttaactagtgatgatcatgcaccttacatagtgaaaattggaacagactttttggagagctttggcggaacttatcagaatttgaaatgtacgtgccaatgacccagtaatcccattctgggaagctagtagagaaagcagtgtagttccctgtgtgtccctgatatctcttcaggggttgagaggctaaaactattttcttgttaatagagtaccaaggtcttgtctcttttgctgtgttgacgtttgcagtaatggtacaaaagtaaagcaggtgtcttagcatgattcagggttgtggcacctaactatacttgtagtcattgcattcttcatgacgtgcactcacagttaaacaaactaaatatatatatacacacacacacacacatatatatccacttttcactgaaaaatgtccttttttttttttttttttttttttttttttttgagtcagagtctctgtgtgtcacccaggctggagtgcaggagtgcagtgtggcgatctcggctcactgtaacttctgcctcctgggttcaagcgattctcctgcctcagcctcccaagtaggtgggactacaggcacgcgtcactgacgcccggctaatttttgtattttttagtagagacggggtttcgccatgttggccaggctggtcctgaactcttgacctcaggtgatccacccaccttggcctcccaaagtgctgggattacaggagtgagccactgcgcctggctagttttcactggacaataccttgatgaagcagcaaaaattattaattttattacattttgacccttgtgtatgtcttcttaatattctgtgggttaaaaaggggggtatgcatcaagcacttctgtacagtaaagtataatgattatctccaggaaaagcactttggtggttgggttgcaaactgaactagccacttttttcatggactgccatttttacttgaaactatgacaaactatggttattcagactaaaaagtgtatgaaggaatctttcaaagaaaacaacaggtagcatttgttgccaatgatgaaattttagctttccagtgaaaattaggattttggagaattttttttttttcctcttcggggtagagtttcgctcttgtcgcccgggctggagtgctgtggtgcaatctcggctcactgcaacctctgcctcccgggttcaagcgattctcctgcctcagcctcccaagtagctgggattacaggtgtgcaccaccatgcctggctaatggagaatttttatctgcctctgtgatatagagattggtggtaatatttacagatgccatattttaatatcttataatgaaatgtattatttggaagatctacataaatcagtaaatcaatattttcttttttgttcgtttttgcgacagagtcttgctgtgttgtctaggctggagtgtagtggcatgatctcggctcactacaacctccacctcccaggtttaagcaattctcgtgcctcagcctcctgagtagctgggattacaggcatgcaccaccacaagtgaataatttttgtatttttagtagagatggagtttcaccatgttagccaggctggtcttgaactcctgacttcaaatgatctggccacctcagcctcccaaaatgctgggattacaggtgtgagccaccgtgcccagccaaaccattattttctaaatgatcaatgcatgatataaaatcatgcacaggttaaagatccattcaaagtgcaaaatggaggccaggtgctgtggctcgtgcttgtaatcccagcactttgggaggccgaggcaggtggatcacctgaggtcaggagttcgaacccagctgtgcaatctagtgagatcttacctctacagaaatttaaaaaattagccaagctcccactggagccaaagagtcgaggctgcggtgagccatgaacacagcactgcattccaatttgggcaatagagggagaccgtgtctctggggggtaaaaaaaaaaaaaaatacagttcattggtagagtttcttaaaggcagccagcctttaagaaattcctggctaggccgggcacagtggctcacgcctgtaatcccagcactttgggaggccgaagtgggcagatcacctgaggtcgggagttcaggaccagcctgactaacatggagaaaccctgtctctaccaaaagtaaaaaattagccgggcgtggtggcacatgcctctaatcccagctactcaggaggctgaggcaggagaattgcttgaaccccggagcggaggttgcattgagacgagatcacgccattgcactccagcctgggcaacaagagcgaaactcttgtctcaaaaaaaaaaaaagaaattcctggctgggtgtggtggctcacgcctgtaatccgagcactttgggaggatgaggcaggcggatcacttgaggtcagtagttcgaaactggcctggccaacgtgatgaaaccccgtctgtactaaaaatacaaaaattagatgggcgtggtggcatgcacctgtaatctcagctactcaggaggctgaggcaggagaatatcttgagccccgggggaagaggttgcagtgacctgagatcgcaccactgcacttcagcctgggtaacagaatgagactctgtctcaaaaaaaaaaaaaaaaaaaagaaactaccatttaccatgttttgatgtagcatcaaagaacaatatctacggttatctagaaagtctgttttggggggagaaaacagttattttccagtaataaaaatatttgtttttaaatgaataattatgtttttaaatttcagtattcatttctaatgtggtaactattgatgagataacctacacaaactaagcctcttaggggccttcggttatttttcaagagtgtgacaagggcctgagattaaaaagtttgaggccaggcactgtggcttatgcctgtaatttcacactttgggaggccaaaggcaggtggattgcttgagcccaggagttcaagatcatcctgggcaacataagaagaccctgtctctacaacaagaacaaaagaaattagccagacgtgttatcacacctgtgttcccagctacttgagtggctgaggtgggagggtcacttgagctcgggaggccaatgctgcagtgagccatgatcacgccactgcactgcagcctgggtaacagagcaagaccccatctcaaaacaaagtttgagaactgttgctatggaaagtctatcaagaaggcacatagggatgtttgttgctgaagtactaacactgaatgatgtctgtgttgtggtgagtagaaaaaaagcaatttgaaaatcattatttatggtatggccccatttttgtaaaacaaaaatatctgtttatttgtgtatgtccaggaaaaaaaagtatggaaggattttacaccgaaatttttatctctagggacttggagctttaggtggaatcggagaaaactttctctttttggtttgtgtgatgttccaagtgtctttttacaacaaacttgggttatcttataatacgaaaaattcgaagatttaaaaactgaggccaggcacggtggctcatgcctataatcccagcactttgggaggttgacacatgtggatcacctgaggtcaggagtttgagaccagcttgaccaagaaggtaaaaccctgtctctactaaaaatacaaaaattagctgggcgtggttgcaggtgcctgtagtcccagctactcgggaggctgagacaggagagttgcttagacccaggaggtcgaggttgcaacgagctgagattgcacgccactgcactcccagcctgggcgacggagtgagactccatctcaaaataaataaataaataaaaataaaaactgaattgatgacagcccaacctgtcacttttttcagatccctttttatgaaagaatttgcttaagttgtgtctgaagacaaaccaatttctttggaccctgggtattctttttctaagggaataccatgttattttgtgttacagattgtttgcgatctttcataggctgatctttctagagttggttaatatccatgtaggttagattgaaaaacttgaattcagaaatgtacggtgttggagcagacatggatctggaagccaagaatagcgttggtgttgttgttgatggtgaatctgaaagagtgggcagatggcaactttttgccagaatcattcagggtcaaagggctagtcatatttacaagggaaaagaggaaaccatgttattaaatatttcatgcaccatatgttcctttcaaatttcagtggcttgactaagaaaattcacttttgggagagttggtacaacaattgaaagcacttagtagtcaactttttccttagtgtttccttcttccttcaacaaacatttattttattgagcacagactatgacaggtcgtgttgtagtcactgatgatatatttgtaaacaaaacaatccctgccctcctagaacttacattctagtgggaggagacacatcataaataagctaagtaaataaaatacagatatgttagtgatatgtgctgaggagaagaataacatagagaaggggacagggaatggggtaggaggtgtaattttagttagggtggctagagaggcctgactgagagggcggcatttgattaaagacccgaaggaggaagatgagcagcaggccctgttgaaatatgtgaaagaatttcaggccgagggaaccaggatgcagaaacctgaggcagagcttgctagtttcaaggagcagcctagaggccactgcaccagagcaaagagcaaaaggagagatgcaggaggtaaaatggagggtgggaagagaatggctgaaggagagggtggccttattggcccatttcaaggattttgactttgattcatatgatgtgggaaggccttggagaattttccgaggggactatactatctgatgtatgtttcagtatgaaatagaatctctctggctgctatgatctgaaggaggacaagggagcagggattccacgggggcattgattgcacagagccaggtaagagtgatgatgcttggaccaaagtggtggcactgggtggagggtcagaaccgacaagatttgctctcggattagatgtgggatatgggggtgtgagaggggccaagtgtgactctcaggttttcgaactgaataactggaagaatagagttgccttttattgaaatgaaggtcgaggctgcagtggtaagctgtgattgcgccactgcactccagcctgggcaacagagcaagaccctgtctcaaaaaaaaaaaaaatatttaccatcaggtaaaaccacttatggttctcaaaactttatttaaaataatagacacttgataaatcaacactgtaggccgggcgctgtgactcacgcctgtcatcccagcactttaggaggccaaggcgggcggatcacttgaggtcaggagttcgagaccaccctggccaacatggtgaaacctcgtctctactaaaaatacaaaaattagtcggcatggtggcacacacctatagtcccacctacatgggaggctgaggcagagggatcacgtgaacctgggaagcagaggttgcagtgagccaagatcatgccaccgcactccagcctgggtgacagagcaaggctctgtctcaaaaaaacaaaacaaacactaattctcattactcttaaaattatactaaggccaggtgcggtggctcatgcctgtaatcccagcactttgggaggccaaggcagatggatcacttgagcccaggaattcaagaccagcctgggcaacatggcgaaaccccatctctactaacagtacaaaaaattagctgggcgtggtggtacacgcctgtaatcccagctactcaagaggctaaagtgggagaatcacctgcgcctgggaagccaaggctgcagtgagctgtgatggtgctattgcactccaatctgggtgacagagtgagaccctgtctcaaaataaaataaaataaaattatactaagtatctgtatacattagaaggtgggaggaagtgcaattattggatcctataggcattaaagttaaatttgtcaggtttttttttgtttttttttttttttttgagacagagccttgctctgttgcccagactggagtgcagtggcacaatctcagctcattgcaacctccacctcccgagttcaagcgattctctttcctgcctcagcctaattttttgtatttttattagagacggggtttcaccctgttagccaggatggttttgatctcgtgacctcatgatctacctggctcgacctcccaaagtgctgggatttcaggcgtgagccaccgtgcctggctatccgattctcaaagaggttatttggacaggctgggcgtggtggctcacgcctgtaatcccagcactttgggaggctgaggcgggtggatcacctgaagtcaggagttcgagaccagcctgaccaacatggtgaaaccccatctctactaaaaatacaaaaattagcagggcatggtggcatatgcctgtaatcccagctactcaggaggctgaggcaggagaatcgcttgaacctgggaggcagagattgcagtgagccaagatcacaccactgcactccagcctgggcaacagagcgagactccatctcaaaaaaaaataaaaaggttatttggaaagattatatccatctacttaatgctagggattggattgtggcacgtggactgtgaaaatgcaaaattggaggtatgtactttattttagagacagggtcttgctttgtcacccaggctggagtgtagtggcacagtcatagctcactgcagccttgaactcctgggctccagtgatcctcttgccttagcctcccaaagcaatgggatcgtacaggtgagccattgcacctggccatgtatgtacattttttataagcattcagttgtttccaatagtctaatacattttgtatggccttcttatttttcatgaaaccttactacccattttaagaaatttgtaatatagaagaaaacagaagtttcaattgtggggtaagtaaagaaagatgatcaaagatgatttgaccaaaagagttttacttcatttaaatgaagcatgttgtcaaagaaaatgaaagtgggaaaaaatgtgaaatcattttgtatcagttcaggacagaaccgtgcttgtgcttcagatctccaagtgtgaacacactgatgtgttgtgaagtgtgttgcaaatagaagcattttttgaatgggagggagagggatgtgttaacatgatttagctgggaattaaacccataggaatgtgtcgggcatattttctgtgactagggggtaaaaagattaaaatggctactgaggatgggcttcagtaagaggaggtctcccgaaggccttctctgccctgtgcctctgcagttccctgactccttgctgtgttcgtccctgcctttttggtagttgtgcccctgatgtcactcccctgtgtgttcagatcctacctgctggccaggtgcagtggctcacacctgtaatcccagcactttgggaacccaaggtgggacggtcctctgagaccaggagtttgagagagtggcctggacaacatagcaacaccctattagtactaaaaataaaaaagttagctaggcataataatgtcctgtgcttgtctagctacttgggaggctgaggcagaaggattacttgagtccaggagttcgaggctgaagcaaactgtgatcatatcattgtactccagcctgtgtgataaagcaagaccctatcctttaaaagtaaaaaacaaacaaacaaacaaaaaacaaacctgcttaacctttcaacactctcttccagtcccccctcccttctgaaaccatattttacatctctggtcctcattaaattttctgtaacttctgcccttgtaactcttctgcaacacaaatgaatacataatcatatacttcctagtagtatttcctaatagttttatgtgagtttcatggaagagagtgttgaaacgtaggtaggtttgttttttattttttaacttttttttaacttttttttttgagatggagtctcgctctgtcacccaggctggagtgcagtggcgcgatcttggctcactgcaagttccgcctcctgggttcatgccattctcctgcctcagcctcccgagtagctaggactacaggcgcccgccaccacacctggccaatttttgtatttttagtagagaccaggtttcaccatcttagccagtatggtctcgatctcctgacctcgttatccacctgccttggccttccaaagtgctgggattacaggcgtgagccaccatgcgtggccttttaaaaaaatttttaagagataaggtcttgctttgtcgcccaggctggagtacaatgatatgatcactgttcactgcagcctcgaactcctcaagtaaactgtaagcttgtgaatgcaggtttcatctcattttctgtttccccagcataatgctgaatacataggctctccataaaaaaaattcttgataagaatgatattaaatggactaaatgagaaattaaactttttattcacttacaaggaatgaaagttctcaaatagctaacttattttcttatgtatcctaggactttttatctggttctggggtttctttcccaatgaatatacttatatatgtttattttatttatttatttttgtatttttaaaaaccagaacatttattgtgtggctaatctttgaaattcttggctgggctcggtggctcatgcctgtaatcccagcactttaggaggccaagatgggcggatcacttgagctcaggagtttgagaccagcctggccaacatggtgaaaacccatctttacttaaaaattagccaggcgtggtgacgcatacctgtaatcccagctacctgggattgtgccactgcactccagcctgggcgacagagcgaaaccctgtctttaaaaaaaaaaaaaaaaaaaaaaagcaaataaattcttgagatgaactggatgctgcaacagctgcccttttgggtttaggtgttgttcctttatggaaatccacgccgcttcattcgcccagtccctgtggcctttagtcttttagccttggcacaccagtcatacttcctcttgcgcttggcggggtagccacatttgccacaggtagacttcggaaggtgacaggccttagagccacagtggccgcacaacgtgtgcatcatattgcaacgcttttcaaacgataacgttccctttgtcatctcccttctgtgtttatttttttattgtggtaaaatatacagaaaagttaccattttaacctgtttaggtgtataactcagtggcattaagtatattcccagtgatgcagtcatcatcactatccattttcagaactttttcatcatcctaagtagaaactctgtacccattaaaaaataatatcccatttccctctttccccacttcttggtaaccacttttatgctttttctctctatgaatttgctcattctaggacttcatataactataataatacaatatttgcccttttgtgtctggcttatttcacttagtgtttttgtttgtttgtttgtttgtttttgagacggagttttgctcttgttgcccaggctggagtgcaatggcgcgatctcggctcactgcaacctctgcctcccaggttcaagcagttcttctgcctcaccctcccaagtagctgggattacaggcatgtgccaccatgcctggctaattttgtatttttagtagagatggggtttctccatattggtcaggctggtctcgaactcctgacctcaggtgatccgcctgcctaggcctcccaaagtgcggggattacaggcatgagccaccgtgcctggcctcacttagcatgttttaaaggtgcatctgttgttacgtgtatcagaatttcttcttttttaaggctgaataatatcccattgtgtgtgtatatatatatacacaccaaattttgtccatctgttggtggaacttgtgtatggtggtttttttttttttttttttttttttttgagacagtctcactctgtctcccagactggagtgcagtggtgtgattgcctgagcccaggagttcaagcttgctacaaccttgacctcccgggctcaggcagtcctcccacctcagcctctcgagtagctgggaccacaggtgtgcactaccacacctggctaatttaaaaaaaaaatttatagagacagagtcttgctatggtgtctaagctggtcttgaactcctgggctcaggtgatactcctgcctcaacctcccaaagtgttaagattacaggattgagctcccttgcgcgacctgatattttaatattttttttaaaaaagtgtaatatgcatacagaaaggggcacaaattgaatgtacagcttgatgaatgatcacaaatgaatacctctgcattccactatcttgcttaagaagtagaaaattgtgagcacacctcagaaagccttgtgcccccttccagtttcactcctgccttcctcctcctcagagataactactgtcttacgttttagcaccatcgattagtttcccttgtttttgtttttaatattcccttgttatccttttaatgtctatagggtctgtggtgatatgctttttccattcctcacattggtaatttgtgttttttctctctgtttctctctcacacacaccttttcagttagttttgctgagggtttaccaattttattaatcttttcaaaaaaaatttgttaactttctcaattgttttccattttattgatttctgctctttattttctttcttttacttaaaaaaatttttttttgtagagatagggtcttgctatgttgcccaggatggtctcaaactcctggcttcaagcgatcctcctgccttggcctcctgaagtgctgggattataggcgtgagccactgcacccagcctactttgggtttaatttgttctttatttctagcttcttaaagtagaaatttagatcgattccaaacccttcttgtccaacataggcatttaaagctgtgtatttcctactaaacactgcgttagctctatcacataagttcatcacataagttttcatgtgttattatcaaagtgtttgatttccaagtatttgggaattctagatatcttggtttctaatttaatttcattgtggtcagagaacatcttctgtagaatttcagtcttctgacatttaccaagactaattttatggcccagcatataacctgtcttagtgaatgttccatttgtagttgaaaaaagtttgtgttgttgcatgtagttttctataaatcaagttgtttcatgcttttgtttaaacatcttctatattcttactttttattttgtacttacttcatctatagctttgctgaggtttttttttttttgtagagacaaggtttcaccatgttacccaggctggtcttgaactcctgagctcaagcaatctgccctcctgggcctcccaaagtgctgggattacaggtgtgagccactgtgcctggcggtatctctcttttttactgagagagtgatgctgaagatcaacagctataatgatatattcgtttattttttcctttaattctatcacttcttttactcttaaaagcatttattccgccgggcgtggtggcacacgcctgtaatcccagcaatttgggaggctgaggtgggtggatcacaagttcaggcgttcaagaccagcctggccaagatggtgaaaccctgtctcttactaaaaatacaaaaattagctgggcttggtggcagctgcctatagctactcgggaggctgaggcaggataatcccttgaacccggggtacagaggttgcagtgagccgagatcgcgccattgcactccagcctgggtgacagagtgagacaccgccccccccccccaaaaaaaagcatttattaggaaacaggaaagactgaacaagaacaagagaactaagcatgtaactcaagaagccagagaaccaaagtaatcccacagtacacagaagagaataataaaaataaaaacaaattaagaatggaaatgatcaataaaaccaaaagctaactttgaaaaatattattgatctaggcacacttctggtaagactaatgaagaaaaagaaaaggtagaatatttagaaaaggaacaatatttagaatgaaaatataactataaatactctcagtttttgcctctttttttgtttgtttgttttttggagacaagatctcactctgtcactcaggctggagtgcagtggcaatcatagctcactgcaacctccgtctcccagactcaagctgttctcccacctcagcctcctgagtagctgggactatgggcatgcgccaccatgtccagctgattttttttttttttttttgtggagacggggtttcatcatgttacccaggctggtcttgaactcctgagctcaagcaatctgccctcctacgcctcccaaagtgctgggattacaggtgtgagccactgtacctggctggttttttttttttttcttttctttcctttttttttgagacagtgttttgctctgtcgcccaggctggagtgcagtggagtgatcttggctcactacaagctccacctcctgggttcatgccattctcctgcctcagcctcctgagtagctgggactacaggcgcctgccaccacgcccggctaatttttttgtatgtttttttagaagagacggagtttcaccgtgttagccaggatggtctcaatctcctgaccttgtgatccacccgcctcagcctcccaaagtgctgggattacaggcatgagccactgcgcccagcctgttttttttttttatagtttgtatttttctgctgagattcaccatgttttcattcattagacctgtcttttcctctaaatcctagaaggtatttgtaataaagaccgtgcctgctaatttaaatatctgagtcatcttggggtctgtttttattgattgctttttctgtacattatgagtcagattttcctgcatttttgcatgttaaataattttgattgtatgccagacatgtgggtgttatattgtagggattctcaatcttgttatctttctttaaagaagttttcattttgttttgacaagtagttaggttactgtagttacttaaattactgtaagtgactggtcgttaagttagtttgaccctgccaggtttggttttatgctttgttagtatgggtttatccttggtccagacacccggcccttagaatagagggtactctttagacttaatgcttggcctttttggggtcgaaacaaaataacagaggtgctcagcaaagtctctccaccctggatgaactggtacttgaatgtcttccagcactgtgaaacctctgtgtctgtgcagttctcagcctcacagccaccgctgtctgctaaactgcatagaatctggaagccatggacccacaggatgcctcccaccttcttctgcctacctctgtgttctgtcaccccacccatgccctcatcttctctcagatttcttgccctacaaattctacctgcctcagcatcctcaaatccaagtctttgcttcctcagttcacagagatggctgctgtcagtttaggtttcatctccctgcactgtgtttgggaaggtgccccaggcaggaagttggaagcaacatgcaacttaccttatgtttttctctttcctcaagggtcacagccttgccttgccttgcctgtcatctaatgcctgaaaacagtcgtctcaaatattttattcagccatacagttgtttaggacaaaaggatatctaataccacttttactgcattatggacagaagcagaagttcaattctgcatattctttttttttttttaagatggagtctcactctgtcgcccaggctggagtgcagtggtgtgatcttggctcactgcaacctccacctcctgggttcaagcgattctcctgcttcagcctcctgtgtagctgggactacaggcatgcaccaccacaccaggctatttttttttttttttgcatttttggtagatagggtttcatcatgttggccaggctggtcccgaactcctgacctcaagtgatccacctgccttggccccccaaagtgctgggattacaggcgtgagccactgcgcccagccagacttttttttttttttgagatggaattctgctcttgttgcccacgctggagtgcaatggtgcaatcttagctgaccgctacctccgcctcctgggttcaagtgattcccctgcctcagcctcccgagtagctggaatatggacatgtgccaccaaacccagctaattttgtgtttttagtagagacggggtttctctgtgttgatcaggctggtctcgaacgcccaacctcaggtgatccgcccacctcggcctcccaaagtgctgggattacaggcgtgagtcaccgcgcctagcctccggccagacttttaaatgttagccttgcaggtagttgtgcagtagtatctcccagccttaatttgctcttctttgatgactcatgaggttaagcaccttttcatatgtttactggccatttggaatatatgtgtacctatgtatctcttgccagttcacctcttttgtccatttttctatttatgtttattcctcattgatttttaggagttatttatattttttttcctttttttttctttgtttgaggcagagtcttattctgttgcccaggctggagtccagtggcacagtctcggctcactccaaccttgacctcctgggctcaagcggtcctccaacttcatcctcctgagtagctgggactataggtgtgtgccaccacttctggttaattttggcattttttgtagagttggggttttaccatgtggcccaggctggtctcaaactcctgaggtcaaaccatccacccacctcggccttccaaagtgctgggattacaggtgtgagctaccgtgcctagcctgtgtactctcaatacaggtccttcgttgggtgtatttattatgactattttcttacactttgtggttcaccttttcactctttatttacataattatagccattgtgcgttttcactctatctctcttttttttttttttttttttttttttgagacagagtcttgctctgtcactcaggctggattacagtggtgtgatctcggctcactgcaacctccgcctcccaggttcaagagattctcctgcctcagtcccccgagtagctgggattacaggcgcccaccaccatgcccagctagtttttgtgtttttaatagagaaggggtttcaccatgttggccaggctggttttgaactcctaacctcaggtgatccacccaccttggcctcccaaagtgctggggttacagacgtgagccactgcgtccggctgctttttcactctcttaatggtgtctttgataaaccttaattttgacttagtctaatttaatcttttatggttagtactttttttgtggtctgtgtaagaaatctttgtgtctaccctaaggtcacaaagaagtttcactctcttacatctcatgtttatagttggcctggaattgttttttctgtgtaggggcgaaggttcattttttccctcatattgacctagctgtttaattgaaaagaacatctgctgctgtgtaaatcaggtatacatgtacgtgtggatctgctggggaactccttcctgttaatttgtttgtctttccttgcaccagtattacaatgtattactgtagctttaaaataaatcttaatgcctggtagaataaggcctcctgttttgttcttcaatattgtcttggcttgctcctttgtatttccatatacattttagagtgggttttatcagcttccatacccaaacagaaatacccttaaggattttcttctctgattgcactaaatctataggtttctttgatcctagaaatgaataatagaatataaagaattcttattgatgaaagaaagctatttcaggaaacttttttttttctgttaatgataaaggctaaatgattcctgtcaattgtttcaaattttcaactttcaaaatacctgctgcttctttccaattcacctttctctattctttttttttttccaattgtatttttctttgacactcagtacttgtcccttgatagtggagaccatgtttatacattttcatggatcgaacagtatttttttttaacagactagctacttagtgaatacgcagttgaatctacttgtttggcaggttcaggcattgaacaagtactaagtgcctgttctgtatcaggtactgtgtcagtctggggtaagagagccaggaacaacatagccaacaaaaggctctttgtgtctaatttatattcctgaggaccaccactggccatctgcttgggagaatggttatggcttgaataaacagtgtggaatgggtccagggaaccggctgaggaaaggggacatttactcaacctgatcttctttgttaagcagtggagagacccctggtggagccagcagtatcctttatctataatagcttgcttttcatcttttttatatcagtggctgcctgtggcctctcaccaaatctggtggactcattttctctgtgtatttagtttttctcctggaaatgactaacagctgcttaagtccttattcctttctccaggtttctggtgctgccataatttgttctatccacttgggatactgctgtagtgggaatattgtccctgttaccatcttcaggttacaaaccttttccccagcttgtggtaaaatcccgggggtctggtggatcccacgcattttaggatgtatatgggaagctaacattataggcacagtgtttttttttttttcactgtgtccgtctgttcttcagaggagcaaaggctagcatgacctttaagtcctcctttaagagtactgaatttctgccaggagcgtggcttgttcctcaagtgtcgctaggtgaattgttattagcaaggagggatgaaattgcgaaatcttaaaaagtagagaattccttcagatttcattcttgagaggtagaaaacaggaaatagaattgctaaacagagaaggggagtgtttttaatagagatatttgtatgagaataagaggatggagccataatctgaggatgcctgtcttgtttgctctttggcttagttggatcttgggttggtttacttcctgtacaaactgtgagttagtagggactgaatttacagtaatatctaaactgattggaaccttcacttgaacagaattgagttttggcgtgttcacttttaagagaaagaaacaaaggcagccaacccagtatcaagagtttagtcaaaacaaacaactcccagatttgccttggtagtgaatagattcagcatgtttgtactttctatttcttcagtatcatatagtaatttattgtttcattggtgattttgcagcatcctaggttgcaaagaatatctcttgtggatgtgtaaagttaaaaaaaaatttttttttcttgtagcagggtctcagtgttactcaggatggtcttgaattcctgggctcaggtgattctcctgcctccgcctctcaggtagctgtgagtacaggcgtgcaccactgcgcctggctgtaaagcacttttttttttttttttttttttgagacagagtctcactcgttgcccaggctggagtgcagtggcgtaatctcggctcactgtaagctccgccacctgggttcacaccattctcctgcctcagcctcccgagtagctgggactacaggcgcccgccaccgcgcctgccaccacgcccggctaactttttgtatttttagtagagatggggtttcaccatgttagccaggatggtctcgatctcctgactttgtgatccgcccgcctcggcctcccaaagtgctggggttacaggtgtgagccactacgcctggcctgtaaagcactttcatatacttttttgtgaggtctatggtataggcaggatacgcattattcctttctttcagtaggaaaacttgtgctttgggtagtcgtgtttttagggttacattgctgattagttttagagctgtggttgaaatcaagtgtctcttgacagcttgagtgtttttcaattggaaacattactttttgaggatagactaatgcattttgaaaacatttgcatcattgaaatgagtggggtctagctttagaatttaatcaaatttttaattttttcacaatttcgtggtatgatttttaatactctattgaatattctttttttttttttgagatggagtctcgctctgtcacccaggctggagtgcagtggcgcgatctcggctcactgccagctctgtctcctgggttcatgccattctcctgcctcagcctccccagtagctgggactacaggcacccgccaccatgcctggctaattttttttgcatgtttagtagagacagggtttcaccgtgttagccaggatggtcttgatctcctgacctcgtgatccgcccgccttggcttcccaaagtgctgggattacaggtgtgagccactgcgcctggcctgaatcttcttttttttttttttttgagacagggtctcactccgtcacccaggctggagtgcactggcatgatcttggctcactgcaatctctgcctcccaggttcaggcaattctcctgcctcagcctcccgagtagctgggatcacaggcgtgtgccaccaagcctggctaatttttgtatttttagtagagacagagtttagccatattggctaggttggtcttgaattcctggcctcaagtgatctacccgcctcagcctcccaaagcggtgcaattacaagtgtgagccactgcgcccagcctctattgaatattcttaccctttggtagttgagtgttttggaatggcggtgtgtaacaaacataccttatgtatgcttttatgatttataattttatgctgttatgaaattttataattataaaattatttataatttaaaaaatttatacattgtcctacaagctttgtggcagttttacgatttattttaaaattaaattgaactttttttgttgtgtttttttgagatacaaccttgctctgttgcccaggctggagtgcaatggcatgatcttggcttaccgcaacctccgccgcctgggttcaagcgattctcctgcctcagccttttgagtaactgggattacaggcacctgccaccacatctggctaatttttgtatttttagtagcgatggggtttcaccatgttggccaggctggtcttgaactcctgacctcaggtgatcagcctgcctcagcctcccaaagtgctgggaatacaggtatgagccactgtgctaggcctaaattgaacacttttgaatagataatacattttctaatttaaactacaaagctacagaacaaacatgtattttcagaagcttgcttgcacctctgccactctgtccttttccttctcctactcctctggaaaattttttgtgtgtggttttttttttttatccttccagtgttcttttttgcaaatacaagcaaatatatatttattacacaaaagatagcatacagtatataccgttctgtaccttcttttttgtttttcccttaatagatcctcaggatctccccatattggaatatgtatatcttccttctttttatggctgcattgaattccactatcttggaagtatcattggttttccaaccagttccctttctggacttttggagtgtttccagtctttagatatgataaacagtgcttcaggggtaacgttatagctgtgggagagattcctaaaagtcggggcactgggtttaagggtacatgcgtttgtcatttctgttagtagatggattctacttggtagatagctaccattttgcgtatgtctgtgtgtatatatatgtgtgtgtatatgtgtgtgtatgcatgtgtgtgcatatatatatatatatatatatatatattttttttttttaagacagggtctggctctgttatgcaggctggagtgcagtggcatgacctcggctcactgcagcttcagtcctcggggctcaagtgatactcctgcctcagcctctctagtagctggaactataaatgtataccactatgcctggctgttttttgtattttttgtagagatggggttttgccatgttgcccaggctggtcttaaactcctgggctcaagtgcctccttggccttccagagtgttgggattataggcatgagccaccacacctggcctgtattaatatagagtaatagagatctatattggtagatatttccacattttcttccgtagacatcattctagtttacagtcccatcgctggtaatacagaggttgccttcatccccaaagcctagctaagagagtgtattgtcaagctttgggactttttccaatctgatatctaagaaatagtattttagtatggttttaaatggtaggtcttctgtgagtgaggttgaacattgttttgttttgttttgttttttgagacgaagtttcgctcttgttgtccaggctggagtgcagtagtgtgatctcggccccaccgcaacctccgcctcctaggttcaagcaattcttctgcctcagcctcccaagtagctgggattacaggcatgtgccaccacacccggctaattttgtatttttagtagagacggggtttctccatgttggtcaggctggtctcaaacttccgatctcaggtgatctgcccacctcggcctcccaaagtgctgggattacaggcgtgagccactgtgcccggccggttgaacgtttttaacatgtttaggggagatacatacttatctttctgtgaaccatctcatcaggttctttgtgtggcagatatttaaataggaaactatgtagggcctagttgattgcctatatagaatccagtaccctgtctatgccccttcactgcccaagcatgtcacaaggaactgccctattccaagctccagaggacctgctgagtaggtgcttttcaggagcttgaaaagactgtttccaggtctacccccaggggttaatttaattggtctggggagaggcctaagtatcagtttttttgttttgttttagttttttagtaaggagagactttattgaaaaggatttttgcaaggaggggaaaacgactgttgaaatagggaggacactctgaccataaggaggtgtgcaggcatcttctttttcaaaaaatgttttcagttttaaaatttaaaaaaaaatttattttatttatgtatttattttgagatgaagtctcactctgtctcccaggctggagtgcagtggcgtcatctcagctcactgtaacctccacctcccgagtttaagtgattctcctgcctcagcctcccaaatagctgggactacacgtgtgcactaccacacccagctaatttttgtatcttttgtagagatgggggtttcaccatgttggccaggctggtctcgaactcctgacctcagatgatccacccgccttggcctcccaaagtgctaggattacaggtgtgagccaccacacccagccacctggacatgtttaaagaacccagtacctcaggtttaaggagcttttatgtttggtccagactacgtttcagggaagccacaagcagagtttaaagcctgctgagcaccgagctggttcttggtgctaacagggctgagactagtgaaaaagtcatgttgaggcatctgctcagttccagtgtcttccttggcatctgcttgtgcctactgtttgccccctttgcctgtgtgttaaaacagcctctgtctcagaacagtgtctttttttttttttttttgagacagagtctcactctgttgtctaggccggagtgcagtggcacaatctcggctcactgcaacctccacctcccaggttcaagatattctcctgcctcagcctaccaactagctgggattacagatgtgcaccgccacacccagctaattttttgcgtttttaatagagatagggtttcaccatattggttaggctggtctcaaactcctgacctcgtgatccgcccacctccacctcccaaagtgctgggattacaggcatgagccactgcagtgtcctttcttgaggaatggtggtctattaggagaaaaaccaaaagataagacccgagaccaaggaaattgtagtctcaatgcaaagatacaatcagaacattgcacaagggggaaagaaatgtcatgctagtgtttgtattttaattgtctttccttatttagaccaatagtagtaacaggtaacttgggttgcatgcttactaagttccaggcagtagtcgaataacttttaatatttaatattcagaacaataaggaagaaatgaaaactaagaacttactagcaatccggagtttatatttcttgaaaagctcattacaggtagttgctggaatgagatagtttgtgtgcatgaagaagaacacacaaaaatattaaaacatgacatgagtgatggtaatacagcaggtccccagataatggcctttcattcactattgtttcattatcatgttgatgagaaaaaaaaatcaattccctgctggagctactgtctatttggaatttacacattctccagtgtcctcgtggaacttaactcttgtttatatcaattaccttgctgattgatggacaaatcatggaaaattggttttgttatatgtcattttgctcaaagccccagtttccaagaacctatcaatgacattaagtgagaacttactgtagttattccctccccattcaaaacaaatttattgtttagaggatataaggagaaaacattttttccctcagatgtatccttctgtgtgttatgtgtctttttcttttgagacagggtcttgctctgtcgcccaggctggagtgcagtggtgcgatctcgattcacggcaacccccacctccctcgttcaaacaattctcctgtctcagcctccagagtagcggggagccacccgctacaggcgcgtgccaccatgcccggctaatttttgtattttttttagtagagacgtggtttcactatgttggccaggctggtcttgcactcctgacctcaagtgatccacctgcctcagcttcccaaagtgctgggattacaggcgtgaaacactgtgcctggcccgatatgtgtctttttaggcaagcagtgcttatgttgtttgttagtggtaagctgcctttgtagctctgtgttaccttgagtgagacatgatgtgatgtttagttcgtagcatcctcagcactgtcttattcacaatcattgtcaatctaaatgcatagtccttcctgattttttttttttgaaggctttttaaaaaagtttaattgagatatggttacaatggagaaaaaccttcaggaaatataaatgtaaaaaaaatttttaagctttattatttattataaaaacaacatacatttttgtaaattattcaatcaaggaaaattgattcagaaagctatttgaaattcaatcagcatgatcaatgatactttaacccctattcaaatgaaagttatcctaattaaaagtaggtgccctaagaccatttttcagggtgcatttgggttctattgcttccacatcaggaactcataattactgtatggattttataagttgatccaaccatggtatgacttctgtgggtactggtaagtccacatcattgctttgtaataatgtataatcatgactggatgcagtggctcacgctgcaatttcagcactttgggaggctgaggtgagaagattacttgagctcaggagtttgagaccagcctccaacatagggagaccccaacatagggagaccgcatctctacagaaaataaaaaataacaataaaaaatgtgtagtcacaatgttaaagtgaatcagaagagttgctaagttatgatcctttaattgaatcaaagttttttgtttaaattggcttgctgaggagtttccagtaaattaataatgaattatgtaattaatattatgttaatattaaatgttattttaatcaggtcactgccctgcatgccaacttccactgaagtgggaatgtttcacagtgattcagtggccaattagcaatgctcagattcgccatttattgagagattcacacacacacaatcaatcaaacattcacaatgtggttattaaaggctgtaattagggggacaatgaaccacagggatggctcagaaggtcagagcactgatggaccctcaagtgggttggaagtcccttggatgctagtaagtgaggagtggctgttcctctcctggagagccgctgggcggcaattgtcatgctaggaggaggcctcagagttctcatgggcaaagattccaaaggcgccccagacatcatcagctccttgctgtgtgtatgattctccaaaggtctgcccagtatcatggtctcagccagctcttggctccatttttccatcggtggtggtactatgccacagcaggtgttattatctcaccaccttattctattagacgtatgtttatcacttcgaagaaaaacaattttactatgatctcagttgccaggctagtacacatgtgcttatcattctttgtttgcttttcttttgagtcaaggtcttgctctgtcacccaggttgaattgcagtggcacgatcatcgctcacttcagcctgtaattcctaggctgaagggatcctcccacctcggtctcttgagtagataggactacaggtgtgcaccaccacacccagatttttttttttttttttttttttgtagagaagggtctcactctgttgaactcctggtggcctcaagggatcctcctacctcggcctcacaaagtattggaattacaggtgtgagtcactgcagctggccttcacttatcactgtgaggagtaaacagctgcatggtgggcttaatgccatctaacacgagtgactccatgttcagacagtaggatcacaaatgattattatatagcaatgaatggccacaggtacatagactaaggagccacatccctgctcctgggatatcctttagtcaaagggctagaagggtcctggaggtttgccacttctccgtgttgaggtacagagttcctagactaagggactggctgcattgttatgtgtgagtgctagtcatggtgctgcctggcacccacaaatgccacagcagacccatggtcgagggagaggagcaggaataccagttaccatgccggagtaacagttacggcactgatgcaccagttaccatgccagagtaacagttacagcactggtataccagctaccatgccggagtaacagttaccacactgatataccagttaccatgccggagtaacagttaccgcactgatgcaccagttaccatgccagagtaacaattatagcactggtataccagctaccatgccagagtaacagttaccacactgatatactagttaccatcccagagtaacagttaccgcactgatgcaccagttaccatgccagagtaacagttacagcactggtataccagttaccatgccggagtaacagttactgcactgataataccagttaccatgctggagtaacagttaccacactggtataccagttaccatgccggagtaacagttaccgcactggtataccagttaccatgccagagtgactgattttgaccaagacctttgggttgtacagaaggggtgagaccatacctgtcctcaagcatttccaacctagtgtagagaaaaacaggagcaagataagaacaacgtactgaaaaggaaattggatgagggcctggaaaaaggggtaaagtgagctggttgggattggtgagtgccacagcttcctgccccttaacagatcagtgccatggtggctgtggtgtccctggcccagaccttctcagacagggcctgggtgccctttacagagcagttgggaagagaagggaacctagccttgtgaccttttgctccacagacctagtcctttgttgtggtgcgaggctcagtcgtcagcccaccgagtcatgtatgttctctggttgcccctggttttggctgaactcaaaggatggctgtctgtgaggagtactggtactttttgccacttgtgtgccctaactgtggtggatgccattttggggattatgctcagcagtgagtcacgtgagatgcacacgtagcttttcggtgattaatccaggtcaatgcccttacccacatacttctgagatgtactgatgatgactacatttaaagctttttctccattggctagaagttgagacccatttcaacaaaagcacttccacctctcctgaagtgcattgggaaaactggaggccattactagatttacagatgatgggccgtgcttaaataacccatcttagctagactccaggtttcgtcacatattccctacctgttgctgccattgagggctttctctgtgctaggcactaccaaataatgctttggtaactttggtaatttggtaaacttggtaatttggtaaatttggtaataaagagcctttattctaaagtgcaaatctaagtttggggttcagtagctcaaaactctctggtggttcccattatatagagtaacagtcttcattttaaaaaaggtcatgtacccttattagaattttgtgagcaaacaaatatgtgtgtatcgtatgtatgtttatatgtatatcagatgtacgcacattagtatgtgctattaagatactttatattatataatatatactgtataataccgtatattataaagcattcataaaatgaaaatgaagatgaaataaattgcattgtaaatatttaaaactttaaaaaatgcgttactggtacaaaatttttttgtttctaaaaaattattattaatgagcaatgggactgaatttgcttcaccgtttttttaaaatcttgatttaacatttgtcatacagctattttaacatcttacactaaagttgattcttgttttttggagacagagtttcgctcttgttgcccaggctagagtgcagtggcgtgatatcggctcactgcaacttccatctcctgggttcaagtgattctcctgcctcagcctcccaagtagccaggattacaggcttgcgccaccatgcccggctaatttttgtattgttagtagagatggggttttgccgtgttagccaggctggacttgaactcgtgacctcaggtgatccacccgtcttggcctcccaaagtgctgggattacaggtgtgagccaccacgcccagcctagtttattcttttaatagtgcttgggggaggtagcctctaagatgacccccagtgattccccacctcctggtattcctggctcttttgcaaatgtcaattctaatttggtcctaaggtctctctcttgagagtggctatagattctagccctgcccaggaaaataggtttgaatgcattggtcaggtgagacacagagcagcacagcaagacacatgaaatagcagaagtatttttattacttactgatcccagagaggagagagagagaatcctgggccaaaacctttattgggagtccagggagtttcccaagtgggtttcctagggctattatgttaccgaagccaatagttctaattgatgggtttaaagggagcaggcacaagctttgtgggggtcacgctgtgattgagacatggtcactgtagcatattcatctagtacttgtggggtcggggaacaagaggggtgagccacataggccctatgtagctgtcctgtaaagaggtaggggaggtggccatcaagaggcatggtgttaggcagatgtctggagtggccacattgagggattggaagcgggtgtgtttctatgctcccttaaggatatttttggaaacaacatgcttgctgcatacaaatattcaaacattttatctttaaaacaaattttagtactggtaacatttattaacttttttttttttcctgttccctaatttgctacccagcttttacatcaaagctcctatcacaacccttcttgtttttttctttttttccctgagacggactcgctctctttcgctaggctggggtgcagtggccacaatctcggctcactgcaacctctgcctcccgggttcaagagattctcctgcctcagcctcccgagtaactgggactacaggcgcatgccaccatgcccagctaatttttgtatttttagtagagatggggtttcaccgtgttggccaggatggtctcgatctcttgacctcgtgatccacccgcctcggcctcccaaagtgctgggattacaggggtgagccaccacgcctggccccttcttgtttttgtagcttgtcacatgatgaatgctttttaccctgggggagaccaagactttgagtaatagtttgcttttataagccagaatttgttctacacatagaaggataaaactgtcttttctggccaggcgcagtggctcacgcctgtaatcccagcattttggggggccgaggcaggcggatcacgaggtcaggagatcgagaccatcctggctaatgtgatgaaatgccatctctactaaaaatacaaaaaaaaaaattagccgagcgtagtggtgggcgcctgtagttccagctactggggaggctgaggcaggagaatggcgtgaacccaggaggcggagcttgcagtgagccaagatcgcaccactgcactccagcctgggcgacagagtgagactccgtctcaaaaaaaaaaaaaaaaacaaaactatcttttctctctggtttctttgctgttccttttcaggagagaaattacaataggattggtggcctaatgatgtaagtgccaaagtttcattcgaggttttggggtagaatgtttttcaactgtttgcttttatctgagacaaagtgggcaaggaataaaggtagagtggtgagaagggtgttatcccttcctgggaacctttttttttttttttttgaggggggcagagttttgctcttgttgcccaggctggagggcaatggtgtgatctcggcttactgcaacctccacctcctgggttcaagcgattctcctgcttcagcctccctagtagctgggattacaggcatgcgccgccacacctggctaattttgtatttttagtagagacaggatttctccatgttggtcaagctagtcttgaactcccgacctcaggtgatctgcctgccttagcctcccaaagtgctgggattacaggcgtgagtcactgtgcccagccctgggaaccttttaattgtcaactgtgtaggtgttcatgctggcctgcataatagagcgcctgctgtttgattttcagttttctgtagaaggaaaaaaaaaaatcaaaccaacaatagcaaaactcatgatacctcctggtctctctctccctctcctctgcttgcatattctggtctataacaggaaatggaacctcctggagtgaggggaaaatgaccttcacatttaggtttctcactctaaagttatttcttaaatattttagcctgagttcttttaataacagacctcagctctagttctttgaaatgcatgtgggaaaatgtttatcagtgttgaaatctgacatttttttaatctcatgaactccacaattgtctgattattaaagtcctgcttacttgactgtgactaaaattctactttcagaagagtagaatgtacccctaccaaattgaagatcaaataaataaagtggacctggaaaagtaaggcttgccattgtgtgtcaaaccagcccttcccagctgtgggctttgtacttaacggactcagaacgtgaatggaagtacagactctggaacatgtaggagctgttatcccttgccagtttcatgcttcactgtccatctcctggccaaatagagagacaagggtgacattaaaatcatgggtttatctgaattcaaatctcagctgctcacttactaacagtatgaccgcagacaccagcaaaacgtcccactgctgcttatttccaagcctttccaaggtcttctggtcagggcagattcttctttcttgttcctaaatttaaagtttcaagaatttaatgcgtttttttttttttaatgaatttaatgccttttggggggtaggttttcctaatttaactttatttttttaaattttatttttaaattagtgaacagtaaaattgactttttcaatgtatggttttatgaattttaagacatttatagatttgtataactaccatcgccaccacaggacataaaatatttccataatcccaataactttcttcgtgctattctgctctcctgcctcctggcaaccactgatctgttctcatcactattgttttgtccttttgagactgtcacagaaatggaagcatctagtatgtaaccttttgagattggcttctttcactgagcgtaatgcctttgagatccatctaaatgttgcatgtgacaacagtttgttccttttcattgctgagtagtattccattgtatgaatatggcacagtttgcttattcattcatctgttgaggatgtgtttgggttgttgcttggtggggcattggtgattacgaatagagttttaagcatttctgtactgtttttatatgaacataattttttaattcacttagcatatactcttcctctgtctgctgtaataaggtaccacaaaactgggtggcttaaaacaacagaaaattattcttccactgttctggaggccagaaatctgaaattagtatcactgggccaaaatcagggggacagcagggccttgcttcctccagagactccaggagagaaatacttcctggcctctctggcttctggaggccacctgcattgcttggtttgtgaccccttgtatcactctgaccccttgttccattgttttatttcctgttttgtaatcaagtctccctcaggctgggcacccctgagggagcatggctcatgcctgtaatcccagcactttgggaagccgaggagggcagattgcttgagctcaggagtttgagaccagcctgggcaacatggtgaaaccttgtctctacaaaaaatatttttaaaattagttgggcatggtggcatgcacctgtagtcccagctacatgggaggttgaggtgggaggatcacttaagcctgggaggtggcggttgcagtgagccaagattgcaccactgtgctccatcctgagcaagagtaagaccctgtctcaaaaaaccaaaacaaaatcaagtctccctcagtcttcctctttttttgtttgcgtggggacagagtgttgctctgtcgcccaggctggagtgcagtggcacaacctcagctcactgcaacctctgcctcctgggttcaagtgattctcctgcctcagtctcccaagtagctgagattacaagcatgcgccacaacaccctgctaatttttgtatttttgtagagacatggtttcaccatgttagccaggctggtctcgaactcctgacctcaggtaatccgcccacctcagcctcccaaagtgctgggattacaggcatgagccactgtacccagccccagtcttcctcttatagggacacttgtgattacatttatgcccactaggatgacggaggataatgcccccatctcaagattgttaatcacatctccaaagacccttttctcccatatagggtacattcataggttccagtaattaggactggcatatcttttggaggcccattttttagcctactacacttggctaaagacctaggaatgggtcactaggtcatatggttagtatgtgtttaatttcatgagaaattgccaaactgttttacagagtggcagtcatttcacgttcctaccagcacccttgaacgccagaattcctggtatcctcggctgaactggctattgtcggtatttttaattttagccattctagtgagtatctcatcatggttttgcttttccctgacagctaatgaggtggattgagcatctttttgtgtgaaaacctcatatcttttaattttcctcctataacctgcataagtatgaggaagaaaagtgtgaactgaatcataactaaaggaaagaagaacattgctgtcttaagcagatcacgcctttgtcgttatacagtatggtacaataatccattacacatctctttgattcatcttgtctgttaaatttctttataaaatttgtttagttgatgacacacctgactctaatataagagttgaatgttgtatcacttttttttttcctttttctgagacagagtctccctctgtcacccaagctggagtgcagtggttccatcttggcttactgcagtctccacctcctgggctcaagtgatcctcccacctcatcctcctcaatagctgggactacaggcgtgagccaccatgcctagctacttttttttttttttgagacggagtcttgctctgtcgcccacactggagtgcagtggcgtgatcttggctcactgcaaccttcgcctcccgggttcaagcagttcttctacctcagcctcccaagtagctgggattacaggcatgcgccactgctgcccggctaatttttgtatttttagtggagacggggtttcgccatgttggccaggctggtctcgaactcctgacctcatgtgatccacctgccttggcttcccaaagtcttgggattgcaggcgtgagccactgcgcttggcctctatataagcttttaatgaataataaagactctaaattatgcttatttactaccaaataatctttttaaatgaaaaatttgttatccctcccagccctcagccatgacccgaagtatgaaataggcatatctttttgctgctattaggctgtagttcatactggtttagtattgctgttgatcacttttagggacatttaatgatattttatactagatcttgagcaccagctatttattttctcttgaagcagtggtttatagtaatacattgtgctcagttcttttttggttctttgtcaagttcaacacagtagcttctgttgattgagttcttgtagttatgaggggaaattaatgctggtgaccagtatttgagaattaaaaacctctgttcagaaaggcaatgcagagtagaataatgaacggatactataaatgacatatcttgacactgggggtttagtataaataaacagtatttcaatctctggaaattgtaaagcccgttatttaacctaaaaacgttaatggctcagaaaacagaattacatggcatttccttgctaacctcccagagcctatcccctccaaagatgatagggctaaagcctggtccactaagttgttgtcagtcgtacgggctttagagtatgttgacttgatcaaacatttactgtttacaaatatttgcttctagctcatatcctgacacttaaagccacgtgatcttgtagaagtcacttagctgatgaggtaaaactgagtctgtttctccatctgttgaatgaggctggtgatagactctttctttgctctctcccaggtgggtaggagatcaggatgagctgatgtctgtgaaagaactttggatactataaagtgctttaggaatgtatggggttattattttatgaaattgttgattcgtcttcataatttgagatacaagatctccattccattgctaatgcttatggaagattttgtcactttcttaaaaaatattgccaaggccgggcacagtggctcacacctataatcccagcactttgggaggctgaggcgggaggatcacttgagcccaggagtttgagaccagcctgggcaacatggcaagactccatctctacaaaaattgaaaaaaaaataaattatccaggtgtggtggtgcacgcctgtgttcccagctacttgggaggttaaagaggaaagatcacttcagcccaggaggttgaggctgcattgagccatgattgtgccacggcactccagcctggacaacagagaccctgactcaagaaaaaaaaaatacatatatatatatatatatatatatatatatatatatatatatatccaagtataagtatatacttagaggtgggctggtaaaggctttttcattatggatttttcagtttatttcttctaagttttgtcagttgaacagtagggataaattaaagaggaggaaaaaaaatccccatcatccttccttccctccttccctccttcccttcctccctccctccctccctccctccctccctccctccctccctccctcctttcctcactccctttcttttttgacagagtctcactgtgttgcccaggctagagtgcagtggcgtgatcttggcttactgcaacctccccatcctgggttcaaatgattctcaggccttggcctcctgaatagctgggattacagacatgagcacctgacctaacatggttctttttcttttttctttttctttcttttttttttttttttttttgagacagagtctcactctgttgcccaggctggagtgcaatggcacaatctcggctcactgcaacctctgcctcctgggttcaagtgattcttctgcctcagcctcccgagtagctgggattacaggtgctcgccaccatgcctggctaatttttatatttttattagacacagggtttcaccatgttagtcaggctggtctcgaactcctgacctcaggtgatctgcccctcagcctcccaaagtgctgggattccaggtgtgagccaccacgcccggcctacatggctctttttctattcagcttttttggtaggattgaggtagttgtagaggagtgttgataggatagtgaagaaattttaacctttgctaaaaacatgcaagacagtgtcataatgtttaagaatacataaatgttatcattttgtacatgtccttttgaaacttgttttttttattcagcttttttttttttttttttttttttttttttgagatggagtctcactctgttgcccaggctggagtacagtggcgcgatctcggctcactgcaacctctgcctccccggttcaagtgattcttctgcctcaacctcccgagtagctgggactacaggcacgtgccacgacacccagctaaatttttgtatttttagtagagacagcatctcaccatgctggccaggctagtcttgaactcctgacctcaggtgatccacctgccttggcctcccaaagtgctgggattacaggcatgaaccaccgcgcctggccaaacctactatttttaatgggaaggggtttattatagatattatatagctaacagttatggggagggctgaaaaagcaggttcttggttgggcttcatgagtgattcccagatggaacggcctcatagacctgggccactgaggaagctgcagcctcttcaggaattgggaaggtgtcagctgtagaatctgccacaatcaaagccttactgctcctggctccagagccaggtatggtcagccagcaaaattgatatcctgcactctgctcctcaacacccatgaagccagtgcctggacacaggactgctcgtcctgcctcagaaaaccaaatgctttccagccgggcttgcccacagcaacggcagaagcaacagatgtgtgctgggcctcccatctgctttccaaatctcatgtaattgtatccaacttgcagaccctaaatcacatttaaactgtaggtgcaggggaggtggtgatgtgtctgttagattttcagcctccgcactattagaaaagaagggaccctggaaggaggatggaatggctatggattatccatccaccatattcgctccaaattcttaacctgatatgaagatgtatgggtataatgtagggatgctttggaccctgtaattttatgcacacttgggaatgtgcaccagaacatttttctttcattagattctcaaaggggacgatgacccgacagaggctaagcaccattaaccagataagttaagtgatgaagtgcccagattctgaaggcaggcaggcctagatgtgaatcctgtctctgcttcatagctgttgtgagatcttgggcatgttatttcacttctgtaacccttaactttctcatctttaagatagggttctgaggatacttttatggaggtttcatggtaccagcatcctactgggaactgtaactcctgctgcctaccaaatatctataatatctttggcttggcactcaaggtcttctctgaagtagcccaaacatgctttcttgccctactgcagggttgctatgagggtgaagtatagaatgcctctatggtgaatgcctggtatagtgcctggccccaaaaagcaaccaataagtagtcttctcttcccaaagctagtcactgcatgtatgtatgtattcattcattcctcagaagaacatggccaacatgaaaattagggtgtgctgctgccatctctgttaagaataccccttggtggctgggtgcagtggctcattcctgtaatcccagcactttgggaggctgaggcggacagatcactggaggccaggagtttgagaccagccatggccaacatatgaaaccccgtccctactaaaaatacaaaaaatagctgaacgtggtggcgaacacctgtaatcccagctactagggaggctgagactggagaatcacttgaacccgcgaggcggaggttgcagtgagccaagatcgcgccattgcactccagcctgggttacaaagcgagacttcgtctcaaaaaaaaaaaaaaagggctgggcgcagtggctcacgcctgtagtcccagcactttgggaggctgaggcgggtggatcacgaggtcaggagatcgagaccatcctggctaacacggtgaaaccccgtctctaccaaaaatacaaaaaaattagctgggcatggtggctggcacctgtagtcccagctactcgggaggctgaggcaggagaatggcgtgaacccgggaggcagagcttgcagtgagccaagatcgcgccactgcactccagcctgggcgacagagcggactccatctcaaaaaaaaagaacacccttggtagctcctacttgtgctgcagaggtgaacttggctatcacttcctctgttcccactgcatgctgtgctattgctgtgctgtttatcacagtggtgtttactgtcttatacttgcctctctctcatctcttctttttttttcttttctttttttttttttttttttttgagatggagtctcactctgttgctcaggctggagtgcagtggtgcaatcttggctcactgcaacctctgtctcctaggttcaagcaattctcctgcctcagcctcccgagtagctgggattacaggcatgtgccaccacaaccggccaatttttgtatttttagtagagacgggtttttaccatgttggccaggctggtctcgaattcctgacctcaagttatccacccacttcagcctcccagagtgctgggattacaggcgtgagccaccatgccaggcctcatctcctcttaaatgtctttagagcaaagattgtgtcataaccccggcacctagtatcatgcctattacatagtagattttcaataaatgttaaatgcatgaatgaataatgagtaaagaaactgggtaatgtttttagcttggaggagagaagcctaagggaagatgtgtttgctgttttgaaaatatttattgtcgctgggcgcggtggctcacgcctgtaatcccagcactttgggaggctgaggcgggtgtatcacctgggtcaggagttcgagaccagtctggccaacatggtgaaaccccgtctctactaaaatataaaaaaaattagctgggggtagtggcgttgcctataatctcagctacttgggaggctgaggcaggagaatcgcttgaacccaggaggcggaggttgcagtgagccaagattgcaccactgcactccagtctgggcaacaagagtgggactctgtctcagaaaaaaaaaaaaaagagagaccaggcgtggtggctcacgcctgtaatcccagcactttgggaggccgaggcgggtggattacgaggtcaggagatcgagaccatcctggctaacatggtgaaaccccgtctctactaaaaatacaaaaaattagccaggcgtggtggcgggcacctgtagtcccagctactcgggaggctgaggcaggagaatggcgtgaacctgggaggcggagcttgcagtgagccgagatcgtgccactgcactccagcctgggcgacagagcgagactccgtctcaaaaaaaaaaaaaaaaaaaaaaatttactatcatgtaaaggggagttggtctcaccctacactgctttggaaggcacaattaggagctgcggatggaagtcacaaaataaggcacatttggactcagtatgaaaagagctttcagataatgagagcaatcaagtaatggggggggcttggaagccagtgattattggtcattggaggtattaaaggagaggcaagataggaagatatagatggggtttgaataccgtgcggggcttctcagcactcttccttttctgagtgcttttaacaagcggactagggaatagatagggcctctgctctcagggagattattgtctgctcagggagagaagatatattcaggtgggaaagggcaaagggtgttaggaatggcttggctaggatagtcagaggagtacgtggagtaaggcaggaaagcatgtttgggcttcctcaaagatgaccttgagtaccaagccaaagattttggagatatttggtggacattgggcattatacatacccagtaagatattagcaccatgaaagctccacaaaagtgtcctgagcgcctagaacagtacttggcacatggtagatcttcaataaatagttgttgaaggaatttgttaaaatatcagagctatgatttaagaaaattattctgtaatctgaatttaggttgggagtggaaaggagtacccttaagtaggacatgagaagagcctgaagaaaggcagaggacaccagtaggcatcttggatgtgggattggtcagaggggagagaggtaaaaatgattccatgactgtgagtctggcgactagaaatgggggtgacattcacagagtagggtggttccctgtagttcctccttgtgcagaaggtgaggctttgcttgtcgacctgcttcagtagtagcattgacagaacagtctctgtgtactctgtcccctcagtgctttctgcatatgtgttgctcactcatcactatctgcatgttcgtggtctctggaaagaatcaactataatgatcagaataattgcctggtaggacgtatttcctttgagttcagcaagacgtgccccctcacatggtgttcctgttcattcataaggctgtaataatgtatgagttaggagacccttttgaccaattcccctctgttttccatcttggaaaaaccagaactctgttttcttgagcaaatgacgttgccaccagccctgaagctccttttcctgggtttgtaggggttggtggaatcctggcagtctgccgctcttcctggcctccagagatcagggctgtgactttccatctgcagatggcagttctagctgcgaggttggtggccgaggaggacgaggacacagctcagggcctgtccttcaagggcttccgtgtgcagcagcagcactctgtaatatcatagatgaatttttgtcaaaacacagagaaaagttgattacacttctcatttattaaaaaaaaatgacttgatagcatagtagatggccccttatgtaagccacttagtattatttcaaaggaagcatgtctgtgagaaaaggggcaaccacttttctcatagagaagaacaggtttttaaatgaaaagatcaacaaatccaaatgctgtggtatttatactgatttagaaaggcagttgactttgggaggctttgttttctcatttcccttttctccttgacatttgacagacgtggttagcagagagctttctcattcggttttcctggagagagctctgcctcttgggcttcctgcatttgtatggaagttttaattttttttttttttgtcaaatgaaaggttgccatttcatttgttcagatttcccacacactgttgcagcaatctttagatttcaaattggctaattcagtgggtcacttaattcttaacttttacaacattttgagtctaaatacagcaaaattggtgcctttttcagctatttttcggcgttgctatattccaagccactgagctctgttttactctgacattttctcttcacttttgggattctgctcactgtgtttaaggcagctcgatagcattttgccaaaaaagagaagttagggctagtgtgagttgaggggaaggggatgtttctgttgttgctccttgctgagtatcttcagatatctaaaagaaacttgtaacacagcgtcagcctgacactggcctttgcagcatcagccttggttgactgtgttctaatagggatgcctgatctgtatcctctttaacttggctataagaaggttttggagaatgtatgtctgagggtgttttaaaagaaaatggaaacaaagctcctttttgccttgagctcatggtttggaatttgggcatttggaatccttcaagccctcctcctgggcagagctggagtccccttagggcactgcctgtcatcttcactacacagctgtgctccagagcagggagccgatggaaagggggacccagaacattccattctgcagaattcccttccagccgtctgtgagaaggcagtttgggacccttttagaagtttgctttataagtgaagaacctgaggccggctgtgttcatattctcagaacttggtgagaatgaggtactttaagataggctctaagatcagcagcatcagcccactcgggaagagctcctctgactcctggaggagaaagccagatgggggaagcattaagtcctgttttcctattgaaaactgaaattggccagccacagtggctcatgtctgtaatcccagccctttgggaggccaaggtgggaggattgtttgagcctaggagttcaagaccagcctgagcaacacgatgaaacctggtccctgtaaaaaatacaaaaattagctggggcatggtagcgcatgcttgtagtcccagctactagggaggctgaggtgggaggaccgcttgggcctgggaagcagaggttgcagtgaactaaggttgaaccactgtactccaggccttttttttttttttttttttgagacagagtcttgctctgtcacccaggctggagtgtagtggtgcgatctcagctcactgcaacctccgcctcctgggttcaagtgattcttctgcctcagcctcccgagtagctgggactacaggcacccaccaccacgcccggctaattttttttgtattttgttatagagatggggtttcactgtgttagccaggctagtctcgatctcctgaccttgtgatttacccgcctcggcctcccaaagtgctgggattacaggcatgagccactgcgcccggccaggcattttttttatgtgtgtctcaaataaaaagaaagaaaaccaaaattttacctgaaagacgagaaagttgatgaagattttgagaaagtgaggaagcaatggcccctccagggcacacccaggtgctgtcccttcttttctcctcagttctcttagctataaaatggggcttataataatcccttccttgaagagatgttgttaatagtacttagatgatttgctaacttatatcaagcacttactctgacccaggtatcggactgggtgcttgacatatattatctctattgtgttttgcagagtggctaagattttttttttttttcttttttgagacagagtctcgctctgtcacccaagttggagtgcagtggtgcgatcttggctcactgcaacctccacctcctgggttcaagccattttcctgcctcagcctcccgagtagctgggattacaggcgtgtactaccacgtctggctaatttttgtatttcagtagagatggggtttcaccgtgttggccaggctgctctcggaactcctgactccggtgatccacccgccttggcctcccaaagtgctgggattacaggcatgagccaccagagacggagtctcactctgttgctcaggctggaatgcagtggcgcagtctcgactcactgtaacctccgcctcctgggttcaagcaattctcctgcctcagcctcccaagtagctgagattacaggcgtgcgccaccaagcccagataattttcatatttttagtagagacggggttttgccatgttggccaggctggtcttgaactcatgacctcaagtgatccatccacctcggcctcccaaagtgctgggattacaggtgtgagccaccgcatccggccccaatttattcaactttggaagcgttggttgtgagatgtgcagttgggtgttgtcatggagaagaattgggcccttcctgttgaccagtgccggctgcaggcattgcagttttcggtgcatctcatcgatttgctgagcatacttctcagatgtgatggtttcgccgggattcagaaggctgtagtggatcacacaggcagcagaccaccaagctgtgaccatgacctttttttggtgctagtttggctttgggaagtgctttggaacctctttcggtccgaacactgagctggtcattgctgtttgtcgtataaaatccactttttgtcgcacatcacaatctgatcaagaaatggtttgttgttgcgtagaggaagagaagacgacacttaaacatgattttttaaaaatttttgctgatgtgggacccgcttaacttcccaatttgcttcaaatgccaaatgatcatagaatggtcaacattgagtttttcagcaacttcttttatggttgtaagaggatcagcttctgtgattgatctcccaactggtcgttgtcaacttctgatggccggtcattgcactcctcatcttcaaggctctcgtctcctttgtaaaacttcttgaaccaccactgcactgtacgtttcattagcagctccttggccaaatgcgttgttgatgttgcgagttgtctccagtgctttacaatccattttgaccttgaataagaaaattgctcgaatttgctttttgtctaacatcattttcacagtctaaagtaaacataaacagcaaggaataagtcattagcaaaaaaatgtaaagtgagaaatgcccattaaaataatgtataacataaccacatttatttaagaatgtactcgaatatcaaatgacaaattccaacagtgtaaaaactgtgattccttttgcaccaacctcatactagccaggcatctttctactgaaactggctggagaccatgtctcagtggtggagccggtataggaggcttcacatttcttcccctaggacacgctgtcattgtttaggtttcttgttttgttttttcctgaaacagggtctcactctgttgctcaggctggagtgcagtggcacagttacagctcactgcagctctaacctcttaggctcaagtgattgtcccatctcagcctctcaactagctgggactacgtgcttgtgccacacatttaggtaatttaattttttttttttttttttttttttttggagacggggtcccactacgttgtccaggctggcctctaactcctgggcttaggcaatcctcccacttcagcctcctaaactgctgggattacaggcatgagccaccacacccagccagttgtttagttttaaagatttaacctggttgaaatgtggctagtccccttatgcttgggtcacagaccaatttgggttaactttgccattgccttgcctgcagatcatggtgctgttgggatgtcattttgctgtaccaagggtaaacagtagctccctccttaacatcagtcctttagtgtaggacttctctattaagagctgggacactgttggccattaggattcctgttccttttgggtttgtaatagaagctactgtccccctgatcattactgattgaaacaagaaatctgttgttcctggatttctttcagttatcttaacatagacccttccaagtcttacagatgtcaagggtttttgaaagtaggatgtattctgatctttttcaagtggctacatcactgaccctcataaaataacggaaaatattgggagatgacttttctgcttaaatgttaggaaactaaattctcagtatactgcttctctagttgttaaggaagaaaatttctcttgtaaactttttgggagactagatttatttcctcccccactttttttttttttgaaatggagtctcgctctgtcgccaggctggagtgcagtggcgcgatctcggctcactgcaacctccacctcccaggttcaagagattctcctgcctcagcctcccgagtagctgggactacaggcacgggccacaacacccagctaatttttgcattattttttggtagagacggggtttcaccatgttggccaggatggtctcaatctcttgacctcgtggtcagcccccgcaaagtgctatttcctcccccgcccctgcttttttttttttttttttttttgagacggagtctcgctctttcgcccaggctggagtgcagtggtgcaatctcggctcactgcaagctccgcctcccaggttcacaccattctcctgcctcagcctcccgagtagctgggactacaggcgcccaccaccacggctggctactaatattttgttttcggtatgtttttgtatttttagtagagacagggtttcactgtgttacccaggatggtctcgatctcctgacctcgtgatccacccgccttggcctcccaaagtgctgggattacaggcgtgagccactgcgcccggcctatttcctcccctttttatgaccattcacagcctttggcataccattaaaatctgatcattgacttctaggtgggagaatggcatctctcttttctcctcatgataaggacttagtctgtaaaccttccagtccctccctaccctgaagcctcccatggtcttttctctctcccttgtgaaggaaaggtccctcttttaaagcattattcagaccggaaggaggacaaaatcaagacatgctgaaaaacccctgttttaatcaactccccttttaattttttcaaaagtcattattaggcatcgaaagctgttgaccttcatcaaacaatgagcacaggatttcttttccgcatcacgcgtggtgccactccagtgctatggtgtgatcagaacacccacattaataagaacattacttctctgaagtaatttgaatcttcatttagtaagactaaccatttcttcaaattttgttttttagtatacaggaaagttacaggttttttttctcttttatttgacaaatgaaagtgattttatattcatcacattacaaaataaataaatgctcattatttaataagaaaattcacatctgggctcagtggctcacacctgtaatcccagcactttgggaggccgaggcgggtggatcacctgaggtcgggagttagagaccagcctgacgaacgtggggaaacccccgtctctactaaaaatacaaaattagctgggcttgctggcgcgtgcctgtaatcccagctacttgggaggctgaggcaggagaatcacttgaacctgggaggcgaagtttgtggggacccaagatcacgccattgcacttctgcctgggcaacaagagcgaaactcccagctcaaaaaaaaaaaaaaattcacaagtacagaaagagatgctgaagaaggtaacagttacctagaaccccacccccagagataaccaccttgtggtaacatttatttctctgccgtagccactcttgtctgaaggagggttcatagtagataggctgtttttgttcatttgcctttaaaaatatatatattgtaaatattcttctgtgccattgaatataaaacatggtaatttttaaatttgtgtggtgtgcatgtgtgtgcacttttgggaaacttgtttatagtgactttcaaactgagcatttacaaagaaattaacagttgttgggtgtgttgaatgtgcagggttttgctgaacactttacaggggtgtctgatcgagtccatcacttcctgtgggcttgtgcaatagcctccttactgatactcctgctttcagtcttcctcctctgctagttatttttcatatgaaaacctgaataatctggctgggcgtggtggctcacacctgtaatcccagcactttgggaggctgaggcaggtggatcacaaagtcaggagatcgagaccatcctggctaacacggtgaaaccccttctctactaaaaatacaaaaaattggccgggtgtggtagcgggtgcctgtagtcccagctactcgggaggctgaggcaggagagtggcatgaacccgggaggtgcagctttcagtgagccaagatggcgccactgcactccagcctggtgacagagcgagactccgtctcaaaaaaaaaaaaaaaaagaaaaggaaacctgaatagtctttcaggaatgcaaatgagatcatgttgctcctctgcttaaaacctaatagcttctccttccatgtcacaaaaaaagccaagcatataaccaagatctggcctaggtcccagcatcgcttcatgtatcattggcccatctttctgtttcttcagtatgacatttgtttcagcctcagggcctttgcacttctttctggttcccctgccctgggacatttggataattgctttttttttttttcatttcaggttctagttcaaattgaatccaagtgaagtgaccccataatacatgttaattgtggaaaaaaatttaaatttagcaaagtaaagaatagagcatgtcactctaccatccactcaacatttttgtggttttttttcatttaattaattccatttattcattctcttaacacaatgcctacaatatgccaggtatattatattggtgttaggttgggctataatattaaaaaggacagtcatggttcttgcccttgaggtctgttagatcaggaattcagaagtgggttagctgagtggttctagcttgtggtctctcatgagattgtagacaagatttcagctgggacttcagagtcatttgaaggcttaactggggctggcaggcctgcctccaagatggctcactcacagggctggcgagcagtgctggcagttgacaggaggccacagttccttgccacacggacctctccacatgcttcttgcgtgtcctcacaacatgtcagcagctttccccagagcaagtaatccaagagatcacaaggcagaagtgacatgtctttataatcacagatgctaccctgctgttctgcagtatcctgttggttccccagtctaccctattcagtgagggagggcactcactcagcaaatgtgccgggaatcagtgggggcattttggaggcttgccactcgctgcctgtaaaatgagcatcataatggcacgtgtaccgctaccaccccctgccagcacaaggggaacatgaacctaacataatgggggcagggaacgggcagaagaggcttcccagaggagacacttaggcagagactgggccgctgagtgggcgtttgggaggtgagggtgttccaggctgaggggaggtttgtaggaaggtcctgagtgggaaggcactgcctgcagtagcgcatggcctggaggagacagcaaggcgggccagggtcagagaggccaggacacacacatcactgtgtccttgagggagatctttcttctctaggaatatagctgagcttaccccagaaaccaggggagaaaataggagccgagttttctggagtgcgtttcttctgtgaagtgaggtttgtgtgtaggaggcatctgtccagagcttttcaagttttatttcattattgctggagggaactagctctggtcctgttggttgggactgaactgtattgctgaccctttcccatgttcaaagttcccgcttccattgggggactgtgctttgtgcttcttcttgtaacaatgtgtttagcttatttagcagcatcagattctccttctgatatatgcattcgataaacctggacacctgtgcagatttctttttcgtggtggcactgtgttttcttttgcttgttatgcgtaaggtcagatatgttgtgttttgggtccctgacaccttgggcttggatgaataatgtcacttaagaggaggcaagtaaaaggccaggcacagtggctcatgcctgtaatcccagcactttgggaggccagggcaggtggatcacgaggtcaggagttcgagatcagcctggctaacatggtgaaaccctgtctctactaaaaatacaaaaattagctgggcgtggtggcgcatgcctgtaatcccagctaattgggaggctgaggtgggagaatcacttgaacctgggaggtggaggttgcagtgagccaagattgtgccactgtactccagtctgggtgacagagcaagactgtctcaaaaaaaaaaaaaaagaggatacaagggatacaagtagaatttgtagtgtgctgattaaccaaagacaagttcctccacccttttctttttggccagagttgatcattttcagaattcatcattttgtcaagatgatttttttgttgttaaatatgaataatttgctttcctctggacttctaaggcttcctgaaattacatgcaaacatttgtgcagtctcatgtttggttattggtttttgggtttgctatttttgggcgaggaggtccatatccttcatcagcttctcaaggggttttttcagaggtacaaggggaggctttggtttggttatgacagtgctacagccagcaacccgggggccacctgggtgctgctcccccacttcaaaacgtgtagctagcaggatggaaatcctgtctacatggaaatccttgtggtgttggataggccatgattcatttccctaagcctcaaatgcttctattgtttgtagtttttctcccagaatcttcatgatccatttttgtacattcttatggccttacgataaattcctagaagtggaatttctacatcaaaagaatagaaacttttaaaggtttttgatacatattgccagttgcccttctggaaggtctactgggtacgtcagtgtacctgagtgttaacagtgacggatcagtattcatttctcttataaggaaggaaatgaaagtcatttggtaacgtagaggcacaattagacctgacagcctttgtgtttctcttctgttctttaggccccccagttccctttgctgctttcttctttatgccacagatttaatgcttgaacacatattgaaattttggaaagttactgtgaatctaatggggcataataggcaggttttcttaatcctggcaatgaccaaactaatcacttgtctgtggtggcttggtggaaaaacggtttgtcagcagaatttggtaaagaagcagtcacaaggacagggtgttggtctcatatttgagtgcttccctgaggaaagaaaagataaagggaagaattgggtgaattcatcagactgtatttggcagatggagatgaagtgggtgcaggtcatcgcccacgacctgtttcccaggcttgcagagaaactgctgctcaggagcttgtgactgtgagggccccgggccgtggcatgcgttggtgcgctctcaagaatgcggccatggcactcacagacacataccaagaagcctcggcccccagtgcccccgccagcctgctcaggggcatgcggatgactggagcctggaaggcgggtcttgctgggcaggacagatgccttactgtcaggacagatgccttactgtaggcccaggaagagatccatgaccgcagacagacttctgcgtagggccctgaggaaagagtggtaaacatgcagtgaagggcggccccaccactggtggcttctgacagggagctggagggtgcaggtactggatgtgtctcattgggatacaaatgagtgtgccccgtggttaggaagatgaggaagtgtaggcacttgcaggggccttttcttttgacttagtgagttcccaccaaacctggccttgtctgtttttgatgccttaggacttggggacaaggccacagcctgtgaccccagcatcatctccccccagggccttgccaccctctagctttcatccttgcctcctcctctgccctctctttcttgtccgatacagtcacaagtgcctagaataaacctcacaccacccactgctctgctgtcagggctaccaccccggccccaccctgccttgccccggctctgatctcaaagacttcccagcctcctgttgccatctgggtctgtcctcctcctgctagcagagagaccctcccttagaaacttacatcagatcttttcactacccagtttcctgtccctcgatgggtacccatctcagttagagtaatgttcagcttctctccacagcctgcgtggtctgggcctggtttccctctcgaatttccctcctgtcactccctttgtttactgccagtgctttttcctcttagggttccctgggccctgcccttcactcagcttctggtgcctggctctttcagacccatgcaggccccagctcacatgacatcttttcggaaagaccttccctgatggcccaggccacagtacccacaccagcatcagctctttgtcctcttccccttttcatttctttgcagctcatgccatctgaaactacctcattcaattattgatagatctgtttggaattccaggagtccctttgcgatcccattcttctaaagattcacatggcctcagaatgccatgttacagtggagagtctgacttcttgttttctgagacggagtctcactctgttgtccaggctggactgcagtgacaatctctgctcactataacctccgcctcccgggttcaagcgattcttgtgcctcagcctcccgagtagctggaattacaggtgcctgccaccacgtctggctaatttttgtatttttagtagagatggggtttcaacatgttagccaggctggtctcgaactcctgacctcaggtgatccacccgcctgggccctccaaagtgctgggattacaggcaggagccactgtgcccggcctgacctcatatttgaataccgagttttagttctggaggagctgcaggttttatgaaaagggaacacatttgattcctcagagcagccacaggccagctctctgaagtaaagtgcacgtgtgcatgtgtgtgcacactcacacacacgtacacacacattcacaaataggacatctcttttaaacagaaatggccacctgcatttgagaaaataaagtttcatgcagaagaaagtgacatgttaaattcaatcatcaagatttagactggtgggaattctgcacaacaaatgacttggtttaattaacatggaaattgcgaggaaaaaaatgaagtggaacctatggatttaaaaattaggaaattttaagatttccatcgtaatttttttaaaacaatatattttacttccaaaaccctgcgttttcacatggtagctatctgctggagctgagtagccgctgctctcttgaacagcatcacccagatgggagagcccccttccccccaacccccatacactcctatgtgtacaacttcctgaaccctgtaagcattagagcttgcagcctctgctttttctgtttccttcttgatgggaagactggcagcaggatttacttggttgctacatttgtgaatttgtaaaataattcatgctctgctaggtctgtaacttgggaggcttggtgtgcacgggcatttagcagcaactcagagcgtatggaagactgtcactggcaagagcaaagtccccccaggacagagccagtgacgactagctgtgtatcctcagtctgatggcggtggaagtgaggcagcaccaaggagcagaaacaggaagtttccactgatgaccaccctgcccccagctaggctgaaaggcctccccagagcccttgcatcagcctggctttgcactggtctgggggatgttgcttgttagagccagtgaagaagaacggtagtaagttacctgatggccaaggctctgtctgaccctgtctgctgtcgtgttcctggcacagaatagtctttgttgaaggaacgaattagtgcatccttccaagccttggaggacctgtctataataggcccactctatagggtctttgtgagaattaaattaaaacccctatgagaaacctaactagagacaattggaagtaacttaaatatttgttcattgggaacagctacataattgtggctgtcattctgtacaacactctgtggctgttaaagagctagaggtagttttatgtggattgatgtgttcaatgtgttcaatggaaaagcaagggtaatataatcccatttatactacagagaaaaatcgggtctgtaaatatgttgagaaaggtctgtcgatagtggttatcttttgagagtggaatggatcggggtgggtatggcctggggacgtgagggggaatttttcactctttatttcacatacatctgtcattggcacagaaaattaagcagtaaacctaaagaaacagaatagtgcttgttgtatagttagatcaataacttgtaactattataaaaggtagttataaagttagtaagggccaaaggtctaactagagtaggtcggttatagaggaaaacagtttaatcagttgttgtttaacttttatggaatgcaacttctttagctttaatttggagagccaaactatggccctagtcttttttttttttttttttttttgagttggagtttcgctcttgtccaggctggagtgcaatggtgctatcttggcttactacagcctccacctcccgggttcaagcgattctcctgcctcagcctgccaggtagctgggattacaggtgtgcaccaccatgactggctaattttgtatatatatattttaagtacaaatggggtttcaccgtgttggccaggctggtctcaaactcctgacctcaggtgatctacccaccttggcctcccaaggtgctgggattacaggtgtgagccaccgtccccggcccctagtcttttattgtattgtattgtattattttttagtcaggtttattgaggtataatttacatatcataatattccccttctttattatacagttctatggactttgacaaatacatacacttgtgaaattgccaccccttttgagatacagaacagttctatcaccccctagaattcccttgtgcggcccttttgtagtcatcctttctctcttctcccagctgctggcaaccctgatctgtttttttgtccctgtagttttgccttttccagaatgtcatatcaatggaatagtacagtctgaagcctttgaatctggcttctttcattcaatataatgggtgaggagtcaaccacgttgttgcatgttatccacatttcctccttttgtgtctctgagtagtattctcttgcatagatgtaccacagtttgtttatccattcaccagctgaaggacagtgctccagggtcctagagcacagaactctggctttgttgtctttatttctaccagttgtctctctctctgtctctctctctctcttttttttttaaaccctagaagattattaagatttataagactgggtatggtggctcatgccagtaatcccaatgctttgagaggccaaggcgggaggatcacttgaagccgggagttcaagaccagcttgggcaatgtagcaagaccccatctctacaaaaaattgaaaaattagccgggtgtggtggtgcacacctgtagtcccagctactcaagaggctgaggcaggaggatcacctgagcccaggagtttgaggtgatagtgagctatgactgcaccactgcactccagcctgggccacagcataagcacttgtctccaaaaatgtttaaaagattgacaatacagtcttcttcagagtctccataggaaaggagcggcacgaaatgcaaattatttggaggttttggaggtttcaaacttttaattacttggcacatatagtgcttactgtgtgcaggcactgttctaaatattgctttcaaatatttaaaagtgcttagaacagttacagcacatagtaaatgctatatatctgcttgttaaataaataaaaatttaagtttccaaataatctgtatttcacataaaagagaagagatgtgggacaatataaataggcaggagaccagggttgtagacccggtactatcacattcccagcctaccccttaacctagtcccttgggtgaattaccgactctgggtctcacttactaacatgaaaggaggttcataatctgaatcctcctgaaggaacagataatatctcaactcttaatagttgaactctaaaatttggtcagtataaaagtaatgttataaaatgtgtctatatctgtttattttacattgtattgggcctggataattggtttcttcctttttacatgtatataacatcctattgggatctgtattaaaagtgtactaaaaacattcaccacatggtggtgctcccttcaaaagccaaactgaaaattgtaggccagcattgagtattaggcatggagttgataggggcagctgtatgtatgtatgtatgtgtgtgtgtgtatgtatgtatgtatgtatgtatgtagagatggggcctcactatgttgcccaggctggtcttgaactcttggcctcaagtgatcttcccacctcagccttctaagtagagtgccagtttatattctacatttgtgctttaagttttttttagggaagtagggtcctgtcattttattagcttgataacttatacagatgccaaaatacaggaacatttgttctttcttaggcattatgacatattcatgtacattaactgatgttatactttttaagtgttccaaatatcttcactcagaagtttatgtgcttgacaggaaaagaaaaaatacatctgtaaggaaagtatcataggtatttatccttcaaaagctgatgtttttatttatttatttatttttaacctaatgtgttcttaagtcatactgggatagcagcagtacccagcctaagagaagctgcagtatagtttccttggtcaaatgactttttctttctttctttctttctttttttttttttttttttgagacagagtcttactctgtcgcccaggctggagtgcagtggcagaatcttggctcactgcaacctcctcctcctgggctcaagcaatcctcccacctcagcctcctgagtagctggggctacaggcacgtgccaccacgcccagctaagttttgtattttcagtagagatggggtttcgccatgttgaccaggctggtctcaaactcctggcctcaggtgagccgccagccttggcctcccaaagtgctgggattacaggcatgagccactgcgcccagccaaaagttggtgtttttaaaaaatgcttcctggtaactgccttagggagaataatgttaacatttcagttgtgattctcttgaagcacagtatttccctgccttttagatttgaaatggatacttctaagcagttgtgactggctggatttcagtcatttacatcggaacactggtctggtcagctcacctgcatctttggtagagagatatctcccaaacatacactctccctgaaggattttcatccttcatatgcttatcaattcccttgccaagtatttactgtttgtccacatgagtacaaggcattgagcttgtgctactgtagactcacagatggtcatgattttcaggaattgaatagagaagatgaaacactgagacactggattcaaatgctagaccttactgggttgacgttagtaatagacatgtgaagaattatagcggttgagaggaaagagacatctcctcactagggtgactggtcagggaaaaagatgggagtggtttttggtgggagaagaggaggagacgggatctgggcatatgaagaggcctggggtactgaggtggaatttcaccacaccccaaatctgttgaaaagaggaaagtgtacaggcaggagacacagaatctggccagagtgaatgtcctgagcaagggcatgggaagaggaaaacgcagggcacagggattaggtgaggatccaactgaatgcttgcccaaggggcttcactgtcgaggattttgactgagatgggggcaaacatgatagacaaactttagggacaatttagcattgtcttcaaacacaggtatgagggagacttttgctggtgataggacagattatcctgaaaattgacctgacaaaaatacttagacctgatccctaaaatataataaacatctttttaatgaatagctgaacttgcaagaaaaaaggtaaatccccaaggcctataaaataaaagatgagctggccgggtgcagcggctcacacctgtaatcccagcactttgggaggccaaggcgggtggatcacctgaggtcaggagttcaagaccagcctgaccagcatggagaaaccccatctctactgaaaatacaaaattagccgggcatggtggcacatgcctgtaatcctgctactcgggaggctgaagcaggagaatcacttgaacctgggaagtggaggttgcagtgagctgagatcgtgccattgcactccagcctgggcaacaagagtgaaactccatctcgaatttaaaaaaaaatttaaaaaataaataaaaaataaaagatgagctgaaaataagaaagacaagccaaaactgtaaacgtcttggcattgtttgctaatttcagtaatcaagatgcttttttcccccaatgttttgtttttgttgctattgttttgaaatagggtcttgctctatcgtccaggctggagtgtagtggtgcaatcatggctcactgaagccttgacctcctgggctcaagtgatcctcccacctcagcctcctgagtaactgggactataggtgtgggccatcatgcctggctaactcttttttttttttttttttttcattttgtagagatggggttttggggttttaccatgttgcctaggctggtcttaaactcatgggctcaagtgtccttctgtttcagcctcccaaaatgctgggattacagacatgagccattgtgcccggctccccaatagttttattgaggtataactgacataaaataaactgcacatatataaagtatacaatttgataaattatatgtatatgcccacaaaacgatcaccacaattaagatagtgaaaagcccatcatcctcagaagtttccttatgattctttgtaattcttccctgatttacctccttcccggtccaatacttacctgttttctgtcaccataaattagttttcatttatataaaattttagaaaatacagtcatatactatgtactcttctttgcctgacataattatcttgagattcatccatgtttttggatcaataatttgttcctttttattgctgagtactattccattgtgtggatggaccataatttgtttattcatctgctgatgggcatttgtttccctttttgggctaatacaaataaagctgctagaacacatatgaacatatcttttttacttttattttttgcctttttcctgcagtatgagcaaagctttgtgtggacatttgctttcttttcctttgggtaaataggagcaggatcgctggtcatatggtagctgtcgatgacacttgagtcttaagggctgctgtttggggaactggagacataatcttgggcctatgagtagacagggacttggaattcagactgccctataaagctaagatcattgattggctacactttgagcaaaatgatagactagaaagaataagctgttggcagaatatttaaaaaagaaacttgccaggcacggtggctcatgcctgtgattctagcactttggaaggctgaggtgggcggattgcctgagctcaggagttcgtgaccagactgggcaacatggagaaacctcatctgttaaaaaaacaaaaacaaaaagcaaacaaacaaacaaaattagccaggcatggtggcgtgcatctatagtcccagctacttgaggggctgaggctgaagtatctcttgaacccaggaggttgaagccgaagctgagattgcaccactgcactccatcctgggtgacaaagtgagaccctatctcaaaaaagaaagaaagaaaggaagttagaaagtgggggagggagggaaggaggaagtgaggaaggaaagaaaggaaagaaaacaaagagaaagaaacttgtctgatttggtctgcactttgagtgagaggaaacaaaaacctcccgagataacttttattctaagcatgccttcttttaaactttgtttgaatttacctggcctctgtagtttgtgaaattccaagaagagacattattttagagagatactaggttgctagagttcctagattactacagttcctagttagctggcagaagtcaatgcatatcctcttggactatatctatctttttctcagtcttaacaccagattcccaaagataaagcttctccaaacatgatctcacaatccaaaactaagaacatgagaaaacaaacaaccttgcatcacagagcaggaaaatgaacagtagaactatagtactttatagctttagatataaaaactgtcagattcagaatataaaatactggtttaaaaacatttaaagaaataaaatgtgaaatagaaaacaagtaaggactaaaatcctatgaagaaaaatcaaataattgaaaaagaactaaaaaagaaatgaaaactacgatcagtgaaattaaaacttcagtggatgggtttaacaagttagacacaactgaagagagatttagtaaactgagggataaagctgaagaaattatacaaaacgcagcatagagagacagaagtctaaaatataagcctataaggagagagaaaagaagtcaatagagataacagatgagagacaatatttgaggagatattgctaaataatttccaagaatagtgaaaaacaagaatctttagattcaggaatcagagcaaatcccacgtggaattaaaaaaaaaaagtcttctccaaatataaggccaatagaacaccaaagacaaaaataagatcttaaaagcaatcagagagaaactgattacctcccaaggaaccctattaaactcaaaggagacttctctacagcaacgatggaaaccagaaagaagacagtggaacagtatcttaaaagcgctgagagaaaaattattgtcaacctagaattttaaacttagctaaaatataatttagtaatgagagcatgataatgacattttcagataaacaaaaactgatgtctccagcacggtctcacaaaggaacttttatactttcaaaaaagagaaaatgatccaaaaaggaagaatgtctgcaatgcaagaaagaatagtgagggaaaagaaaaagtggaatgaatagagaattagtcatgtggtatcacatggcagctcactcaggaatcataaagctggccttgggataacagagctaaactttagagtcctgagtcctgttaatactcaatcctctgtgaaattcaattaagtgagcttcaagttaacctaaaaagctgtggtgaggctgggcgcggtggctcatgcctgtaatcccagcactttgggaggccgaggcaggcagatcacctgacgtcaggcgttcgagaccagcctggccaacatggcgaaaccccgtctctactaaagatacaaaaattatctgggcgtggtggctacttgggaggctgaggcaggagaatcacctgaacctgggaggcggaggttgcagtgaccagagatcgtgctactgtactctagcctgggcgacaaagtgagactctatctcaaaaaaaaaaaaaagcagcagctgtggtgactcttttcttgaggtctttgggggctgcctgttggtggacaggctggtgtgaagttggtagccctggaggagctggggggagttgcagggctagtgtagacaagctacagaagccacaagggaggtgctgcttagagggggctctttattctttgtttggttttaatttgagacgggttcttcctatgttgcccagcctggtcccaaacccctgggctcaagcgatccttctgtcgcggcctcccagagcgctggggatacaggtgtgagccaccatgcctggcctctttactcttattaatttaatgctggttttcctagatctttgtctttttttctggattttgggagatttctttccttgagtatttttcacttattttctattaattttttattttggcagtcatactttttaactaccacagctcttatttaaaaaatccttctcctagtatcacattcttgatttctgggcatataatctttatgggtctctctgaggatatgagttacggttttttgtagtttggattatctccagtttcctgaattatctgtttccttcaggataatctgttcatcttggtctttttctgtgatgctctaggctttcctcagcagtctggtaatcctggttgtccattcatgcttaagaacatgggaatggaaggggtgttgggagtcctatatatgtggatggggttgtccattggctggtttcagtattggactaatgagtagaggaatcaaggaacctctcagggctttgtgttgggacgctgacacactgcattagtaccttctagactatgagcaggggaatcgaggaacctctcagggctttgtgttgggacactgactcactgcattagtaccttctagactatgagcaggggaatcgaggaacctctcagggctttgtgttgggacgctgacacactgcattggtactttctagactgtgagcaggggaatcgaggaacctctcagggctttgtgttgggacgctgacacactgcattagtactttgtagactgtgagcaggggaatcgaggaacctctcagggctttgtgttgggacgctgacacactgcattagtactttgtagactgtgagcaggggaatcgaggaacctctcagggctttgtgttgggacgctgacacactgcattagtactttctagactgtgagcagaggaatcgaggaacctctcagggctttgtgttgggacactgactcactgcattagtactttctagactgtgagcaggggaatcgaggaacctctcagggctttgtgttgggacactgactcactgcattagtactttctagactgtgagcaggggaatcgaggaacctctcagggctttgtgttgggacgctgacacactgcattagtactttctagactgtgagcaggggaatcgaggaacctctcagggctttgtgttgggacgctgacacactgcattagtactttgtagactgtgagcaggggaatcgaggaacctctcagggctttgtgttgggacgctgacacactgcattagtactttctagactgtgagcagaggaatcgaggaacctctcagggctttgtgttgggacactgactcactgcattagtactttctagactgtgagcaggggaatcgaggaacctctcagggctttgtgttgggacactgactcactgcattagtactttctagactgtgagcaggggaattgaggaacctctcagggctttgtgttgggacactgacacactgcattaatactttccaaactttatgttcttcagagaagacccctccttgctgggggtgaggaggtggagaagtgggtcaggcgtgtgccttggctggctgccgcttcatatacagacgtatgatccctggttttcccccgccctctgtgtctcactcccttcctccactgcacttgccatcttcatgtttggggctcttctgggcagatgggcttgatcctcacctgtgaattcctctgctctcctttgccaagcaatgcttgcccatccactttcagatcccccagtttgttgaaatatctagtatgatgacagcttctctgttctcaccattgtcgtggtttataccttttttactccttggctgtaatttaaaggggtcacaggcaggagggggatgagtgcatgtgctcagtccaccatcttgaccgggagccccagaggcatcatttcaattcctgtgatattatggattcctacgggtaggaaaaacacagcccattcaaccaaatatactttaacccctagagatttagctttaacttgtttagaattgtttaaaagtcccttgtattttgcagttttttcattttctccttgaaagtaaaaacatttgtggcaaatagggaagaaaaactttccagttaatcgagaattaggataagtgagatttaaatattatcagatactgataagaactatggcttttaaagaatgtcgtcttagaatcagtttctaattacttgtgtgcagaagagtcctgcagctgtgaggtgatcacagtctttggcctaagccactgccaggtgagtgaaagccaatctggagtcacagagtggcagcgactgcaccggagatgtgtgtgccatttgttaagatgagtcaaatggtagttagggcaacgaagatccacagagggagaaagaaagatactggaaaagcagcagcacagtttaataacagtcatcgttcatgatggcaaggttgtttactataaaaattccatccttcttgcctctgtgctgccccccaccatttttttatttgacattagggcttgctgatttatggcataacgcagtacatttcacctctgaaacaaagtctgtaaaatcttgagatatattaaagtctttattccccaacgctaaagacctcatactgtttagtcctctatacatttagccctttatgcttggggagggggaggttataaatttctagagggaactggattggcaatggtatgtttgatggtgaaatgccttgactaaacaaacaaggctgctccagaaacgcacacacagcaaacctatatgccatataagtaacgtgttatgtggggagttactttaggtttaaaacaaatgtcatactcttgatgcttttaggtagctattatcttggtaaggataagacagaaatatggtgaagttgcatctgattttgagggatactgcgggcaaacctgacagctagcttggttactagaggtttaattagttacagctgctctgccattgtattaatagagccactctgctttcaggcaccatggatgccttttataatttggatgttcttaaaaagagcactgtgtgaaagtgagcagccctgggccgggcgcggtggctcacgcctgtaatcccagcactttgggaggccgaggtggctggatcacgaggtcaggagttcaagaccagcctggccaagatggtgaaaccccttctctactaaaaactacaaaaaaatactccgggcgcagtggcaggcacccgtaatcccagctactctggaggctgaggcaggagaatcgcttgaacccaggcagcagaggttgcagtgagccaagatcacaccactgcactccagcctgggcgacagagtgagactcagtctcaaaaaagaaattgaacagcccattttgtgaaccacttcaaaaaaaagcaaacacattttcctctggcttttggctgttttaggaagaagccatacggtgaaccaggtgatgctgaggttatctggatccaggccatgcagatgaagccatatttacctttgtgatattggggctgatcttggagctgtctggatctgaccagtctccagatgaaaactcttgcaactttcgtttttggatagtgctcacctcgtatctgtactcgtacctgctatttctaggcgaattgtcccctttctcctccctcttccctcatctccctctctcctctgcctggctgacaccaggaaggaggagttttcttttatttagataaaaaaaagttgagaggagggagctccagaaatgtgggatactcagcactggagacatttgggctggaattcttgtttccattcttttcttaccatatgaccaagtaagtccaagaaagtagataggattctgagtgggcagtgaaggtggaaatgtggtcctaaagagaacgggcaaattaagaaaagattgttttaagacagtcaaattgttttgcctgttgaagaaggtgatcagaccctaatgaaactgaaaatgaggagagtgttcccatctcctgcctggttctagcgactctgcaaatgggtgcctgattggtctgttggctctgaagccagcctttgctggatatattcagcctgttttgaagttgtgcagagaacctcacttgcgtcattctgaagacgcagtgagtcaacgcagtcccaagagagcagtaatggccccaaacagaaacttggaatgaaaaatagccatggatttaaagacatagcacattcttcctatgacttcatttggtaatggtaagattaattcacagaaaacccttcttgagtggcgtaccttaaacacatgtagaatgatttttttctttgcttttcccatttagccttttgaaacaggatacacagtagggtgattggtttgggagggcactggtacagtaattctccacctctcacttgcccgtgtgggtgccccatccccaccctcaggcacacacgcactcttagctgcttttggactcctcccgcaatgtcacaatagttttctttgaacattcttgaccctcagtcatgttgacatgcgtttggattttcagtggagaagaattgccagagaagaatcttcctctgattttaaccattgaccatatttatatatgcagtttcagcttgacttttaaattgataatcttttaatagaattccagataacatcttactgtaacaaacaccaaggggattatccaaattcctatttgaaaatatgtcttttatattaccagatttgccagctgcattattatctattagtgtgtactaaaagtatattattttggcttattttgagattagataattcccagtggaattctccccttaaccatctaaatctgtattttttttttccccatttagtttcctaaacagtgaggcttctgggcaggaaatgagagaagaggaggaggtaatatagaataatgcagtggctttcaagcattgtgacccatatgaggaatacatattcagttatgacttagcattcacatatgcacacatacatgtacgtatatacatcacattcacacatatgcatatatgtacatatacagctgaagaaggtctggattagtacttttccttattgtggagcacagtgagtgatattttctttttctttttcttttttttttgagacagtcttactctgttgcccaggctggagtgcagtggtgtgatctcggcttactgcaacctccaccttccaggttcaagcagttctcctgtctcagcctcccaagtagctgggactacaggcatgcgccaccatgcctggccaatttttttgtatttttagtagagacggggttttgctatgttggtcaggctggtctcaaactcctgacctcaagtgatccgcctgccttggcctcccaaagtgctgggattacaggcgtgagccactgtacctggccgatattttctattttatttcattttgaaaaagataggctgtgactcattagtagtggatctcatgactaagaatggatcctgacccaagtttgaagagactggtaggggtaaatttagagcctggggctccaaagtttgtctacccagttttaaatcctggctttccccttaacttgggtgggatcacaccattaaccgtgttacccctctgaagctttggctcccacacctgtgagatgtgaatgttgataacacacacccacctcataggattaatgagaacatgccaagatataatgcgctgaaggtcttagcatgcctgcgcagagccccagcatctgttagctgctgctgctgccgctgtggtggtgactgtccttgctaagatgctgcagctggattggcttcgtgggaagttgtggaattctgttccctgaggatgttgggaaggacagattgtacttaccaagagcatttattgttgtttttattttcttaaacatttccaatgaaaatcatcaaacctataaagttgaaagaacaatgcacctagattcatcaactcttaacacttgctatctctcttacatagaaacatttcccttttaccagtccacttggaaattggctatatactcacgatagccaagaacaagaacactctcttacaccatcacatcattgccacacttaaggaaatccacactgatccaggaacattatttgatatacagtccatattcagaatcctccaggtatcagtaatattttaattatgacccatttggtgaatttaagatggattagatggcctgtggagttattcatggagctgaagacttctgtgaagtaaaaaataaccacccagtgttaagtgtaactctcgtgtggaatattaaatcaattgtgtgttttttttggcatccttgatgtgaactctggagacctgatgagatggaggctgtgattgtttactctgtgttagcttggacacttagcttggcagtaatcacaagagctttagggagtgcatcctttgctagttcataaagatgtattctgataacgggggaccaaaaggatatatcctgaattgcaaagtcgagcagtagattacatttggatttgaatgtaagtggctgtgaattagaaatatttgttggaattagaaagtgtctaggtaggaatgtaaggtctcccctcaaattgagaatgacaaggctgtcttctaaggacagaatttaaggtgaacactgtggaagtttgtgcatgtgttttttgtttgtttgtttgtttgttttttgttttttttgtgacagagtctcgctctgtcgcccaggctggagtgcagtggcgcagtctccactcactgcaacctctgcctcctgggttcaagcgattctcctgcctcagcctcccgagtagctgggatgacaggcgggcatcaccacgcccagctaatttttgtatttttagtagagacggggtttcaccatgttggccaggctggtctcgaactcctgagctcaggtgatctgcccacctcggcctcccaaagtgctgggattgcagggattagccacagcacccagcttgtgcatgtgtgtttttaagaaaacgtccacaaggtaaggaaattcaagcaaccaagaaaagacgcttgataaacagtaagtcccatcttgctagtttcttctgtatttctccagggccactttaattgattctaaaatgtacattatttctcatttttaaaaaaaatctctaaaatcagggtacatcttaaaagcaatataatgccatggtttaattggcacatgatttagtgatacataaaataaaggcacctcttgcagtggcatcttcgatttgaagaagtataatattctacgaatatacaaatttctgtgtttttttgtccccccaacccctgcccttttaaagacatatagtaatatagtggggttataggtttatatactgctacttagctgtgcagagaaattacagcatttaaaaaaatcaccaatctgtcttcctcataagtcatcatctagaaatggggagaagcaaagagtggtattttggccagttaataaggtcttatattcttttggcttaaacagtatcttttgggtaaattctggattttttcatatatcctgccatcccccattaaaaaccagcatctggtcttgggggattgtgagatttttgtggaggtgagggaggccctggcctatgcttgctgcctttgctcatctagtctggtctggtctggtccctgggcctttcgcaggtatcccctgaagtgtggttggtggtcttgaatttttttcttttgtctccatcagggccagggaactgtccttgcttccttttggtacattcaccctgcagcagatgtcatggcttccaagtggaacttcactctctttcttactagttaagctacaggaggcttagagtgctaaaaccgagatgcttcccctgcataaggccatgcaacacggccattttattctgtagccatccgtgttgggatgagtggaaggttgcatctgcgaggtggtcttctcctagagtttcaattaggaagtggggcaaaagccccagtgccttcccttcaacctgacgaccagtctaccctctccccacctgtgctagttatcaatttcttgcttgttatctccaaatccattctgctttgccatgtttcgtgacatgggaactggactctgtcaacagttttcctttgcctgctggcgaggtgttaggctttgtcaacagagtgctggagggacatggcaaggtcatggtgggaggagggcgtcctttcccagtgtgctgattttcactggtgagtgagtatcagtggactggcgtgcaagatgcccagaaacacatatcagccatcatagacagcccagtgggtggtaccgtgcaccagctccaaccacacacaccctgcagggagtttctccaccacgtggtgggctgctgccctgggccagctctggatcacgccctctgacaagcatgtttgccaccggcatgctgtgtgttcctgtggagctgtgccctttctgaagagtctgaatctcagctttggggttgggggaggctctcctaagttcttagttcctccctcttcactctacctgccctttttaagacacatagtaatatagtgggctctaagtagtagacactttgttcatttgctacttctgtacccctgggtcctcttttactcttctgtcatttgttaaaaatctcggccgggcgtggtggctcacacctgtaatcccagcacttcaggaggccaaggcgggcagatcacttgaggtcaggagttcgagagcaacctggccaacatggtgaaaccccgtctctactaaaaatacaaaaattagctgggcatggtggtgcatgcctgtaatcccacctactcaggaggctgaggcacaagaatcgcttgaacccgggagatggtggctgcagtgagctgagatcgtgccactgcactccagtctgggcgacattctggaactctgtctcaaaactaaaaaaaaaaaaaaaaaaaaaaaaaaatctcctgtgggacttcagtctgtggaggttattgagtgatggcacagaaaggccaatcccaataaaagaaaatggaaaatgtttattacttccatttccaagaggggagcatgccacgccacaccacacaggcacatggggaagcaccatccacagggcagaaaggagctgggggaacgcccaggccagagcctttgttgggcttctgtgggaaaggccagacagggccagggaaacatctgaggattggctattttggataattctggggggccctggggcagagggccgtccctcgttgtctggttcctagctctgggtgatttagggtaggagaaatattggctctgtgtgtgagagttagataaggaggtggttcagagaatgggctctgggtggcaggggagacggaaacagctttggctgtgtgtgagtttgaccctgtgattagactaatggatgccaaatagatgaatacagaatctcagaaaacacagaacgctctcttagcagtatctactttttgttaataattcttttattaaattttccctattgaaatgactggtgtggtttctgtctcctgactggtacatcacctcttcctcggaatttgcgggcagggaagtgatgatacatgtttgactgcctcctactctttgcaccctgatgtgagggaagggctggacccttctacatctttctgtctggatgaagctcctctgctgtcatttcctcctccttccctagtgcggcaagcagctctgccagcttgtcatagaagggcatttaagtgactttgccaacacaaacagtactgcaatgaagatatgccacactttgcaattagttattcactttaaagttctgttatgatatagtaacttaataagtgaaaaaaacatcttggaccaataaggatggaagaaaagtatcggaaaactagtcagaattaaaataaggactaaatcacgacttttatttctgtgatttctttttgtatttttgaagctcttttcttaggtcagggccaccatggctttttgttgcattgatctctttatcattatatgctgtttctccttaggctctgcaatattccttgctctgagtctactttgtctgataggcacttcagctttcttttgatcacgcttgcataatacaccttttcccatccttttactcgtagcctgcccgtgtcattgccccagtggggaactgctgttgctctttacttggagccaggctcatggtaagaggatggggactttcttggttctcttagtctgactccatcttaggcaggtactgtgtgcctggacttcaggatagggctttcttagcattgtgtgctttcaccctccatgccacctggactctgccttctgtgtgtgtgtttgtgtgtgtgtgtggtgtgagctcccgtgtgagagagaatttcccacgtttccccccaaccccacccgaagctgacttttgcattgtatcagtgcagaatccagcagacgatcatatttgctggtacctcacccccaggagcagcagatctttgcctgggtcccggggacagggaaggtttcttgcccttcccccagtggattacggcttttgcattaggtctgagagaggggctcaggaaggaggcaagattttacccgagtccggtattgaggggtgctctctccagcctcgtgctctgctcccagtcgtcgtcacgagcacctggtagtggcccatggaaaagggtttgcaagtgagttcagacaggaattctagtgttacaccagcccatgctcagctccataagaattcattaaaaattgagatgttttcccgtcacctgttgacatggcagcctcatcttcctcctgtgctctgtgaagggtcacagggtttgcgtgtcccatttctccttggagggatttgtcactgattagaattcagttcacctgatggccttgtggcctcagctctctgattagctcaagaaaagttaggattttgttgattatctggctttttctttttgttgggttgaaagttctcttatggctttctgcatcttaagcaaggggagtagaactctatttcttcacctgtccctcagcagaattatgtaagtaaaataaaatttaggttcctcacagatcagtgcagtttgctaatacaaatactgtatgtatagttactctgttttccacatccaccattggtttaagtttgaacacccctgttttactttgtattttgaaataatttcaaacttacagaaaatttacaagaatagtacagagaattcctacatgtcctttacttagttcgagtcatcaatttttaacgtattgctacattacatttgctttaccatttccccccttctatatgtgtatgggtataaaatttgtttttcggaatcatttgggagtaggtcacaacattttgtccttttatcccttaatatttcaagtgtatgttgtaagaacaaggatcttctcttatgtaactatagtataattattaactttaggaaatttaactttgatagaatatttttatttaacctaaaatccgtattccaatttcctcaattctcccagtaatgtcctttctagcaattacccccttgggtgtaggatccagtcctggatcatggattgcattaatttgtcatgatctttaatatcctgtaagctggaacagttcctcagtctctctgccttgcatgacattggtatttttcaaggacatggagcagttattgtatagaatgtttttcaattttggctggaacatttcagtttcagtttgtttgatgtttccttactattagattcaagttacacatttctgttttagaatattacagaagtaatgctgtatctttctcatggtgttacatccatttgcataccttgtctttctgcctgtcgttaatgatattaattttgattatttagtcaaggtactgtctggttccttcattggatagttgctagttttcctcttgcatctatttgcttttcggtttttgttttttcccttaactttttctccctgtgatttcctgaaacctcttgcatctaaaaagcaatctgtggggagacattttgtgaccatataagtaacctgctcctcatgaaacataaaatacaaaccttgggttctcttagagtggagaaagggatcagtgatccaagaccgtttctcataaagctaatacctcagagaggctacaccatcagagagaaaatgtacgggggagaagcacattacacagtatcaatcagaaaggaatatttctgtctgagctttcactttgagtggagggcaaagaaaaaaaatcacatgagaacttgtggctgctgaccagctgctcccacatgggtgtagaaactggttttatcctatctgtgtgacctccaatagctgcaagttggaaatcttgatttagagtggacctaggtttttaccatccctgggtgcttgacaaaagcaagtttaagtcttccctaactcagagtttccatagatcattgcagccaatatgaacacaccaaaaaaggacatacacacacacacacacacacaccctgaaacaagatatcatgcgcaagagtcagtagaaacaatagttgttcctgacaatttcagatattggaaatattgaatatagactataagttaatttactacctttggggaagcaaaagaaggaattgaaaatatgaggaaagagagagatacatcaaaaacaaccaggcagttttatttttaaaaatcaaatataatgttcagaagtaaaaagcataatcattgagataaaaaatttatggattggttaaatgttagaatagaaacagcagaaaccagaattagtgaactagaagataagtctgaagaaataacacagactgaagctaatagaaacaaagggatgtaaaccacgagaggctcagagatatagtgagaaggtccaacttatgtctaattggagttccagaagaagatactacagggaatggcaaagagagaatattgaaacagataatgagtgagaatcttcacaattgatgaacaacaggcctttgtctgtcatttgtggaagctagcacaacagtttaaacggaggcccataggccatgtctaaatatttaaaagttacaaatgtgacagactgtgaaataaaatatgtctatactcctaccttgacaaatatgtctctctgatactctagaagatgaggtttaaatgtagagttcttgaactccacagagctctatgctggcacatagcagcacagagtgagccagaccttcgcctgtggcccccacccttttgtctttcttcccgcagctttatccatgctgtgaggggcctcatgcacacatgtgtacatacttcagcctgcatatctaagctgtgttcacgctcctcacaagcatgcttgtaggtggcaactctggcctatgcccgtatgctggtgcattctactttctttcatttttattttatttatttatttatttatttatttatttatttagagacagggtttcattctgttggccaggctggagtgcagtggtctgatcatagctcattacagccttgaacttctggactcatgcagtcctcctgagtagttgggactacattaattaccacacctagtattttttttttatttttattttttgtagcaacagggtctcgctgtgctgcccaggctgggtttgaactcatggcctcaaacactctttctgcctcagcgtcccaaagtgctgggattacaagcatgagccactgtgtcgggccagcattccactttgataatagacctgtggaaaaggcccatgcaagtcctgaatgtgggcatggattcaattaagtagggaattccaggatcctggatacctagaatatggtgatcagactcagggtgggtgcatctccttgggccttcaggccccttgccctgtggggagaggtggagtcttttaaattatagaatctagggtaggggcctctcttggaacaggttctaagggtggtaatgagagacaaaaattctctggttcaggaagcccatcaaattccaaagcggcaaagaaggaaaggaaagaaattcatgtctaaacatatcagtaaacctgtgaacctatagaacatcaaaaccagaaacgattcttaaaaataggaagagagaaaagacagattacctacaaaggaacaacaattcatatgccagctggcttttctataccaagagtggaactactgaaacagtgttttcaaagtaggcagtgaaaataactgttgatctagaattgtgtagccatgaaacagcctttaaataatgagaacgaagtgaaataaagacattagataaataaaaacaaaaagaatttactgctgagaattcatcactgtgatggttaatattaggtgtcaacttgattgggttgaaggattgtttctgggtgtgtgtgtgagggtgttgccagaggaaactgacatttgagctgggggactaggagaggaagacccaccctcaacgtgggtgggcaccatccagttggttgccagtgcagctagaacaaagcaggcagaagaaggtgggataagcttgctgagtctcctggcttccttccttctcccatcctggatgcttcctcccactcctcctgcccgtccacataagactccaggttctaaggcctttggactcttggacttgtaccagtggcttgccaggggctcttgggcttttgccacagactaatggctgcactgttggcttccctggttttgaggctttcagactcggactgagccactacgagctctctttcccggcttgcagacctcatatcgtgggactttgccttgtaatcatgtgagccagttctcccaaataaactccctttcatatatacatatatcctattagttctgtccctttggagaatgctgactaataccatcactaaagaacatcctcaagaagaagggaaatgacaccaagaaggaaggtttaaaatttaagacaacattaagttgatccagagagatgcattaacttgcctaaagatcacacttggttcagaaccaagcctagacttaaaccgagacaggatgcaagaaagaaatcaagttaacgacagaatttcattttcacccaggaagtagacacagggtcccttggggctcattttgggagaaggcctacctttttcccaggacacaccaccatttacacgtcgagtcttacagcctccaggactttaagcttcccactgctaatgtgtcatttttcctttctcttgccactgagttgtttgctcaactagaggattttactttctgcccttcaagttcacatggtagctcgcatggtaacataagtgagtcttggcagtgttgccagggacaggatgactttaatttcattcctcctcatcttgatgctttttttccctttccagttcccatcagctacttccctacccctagtggtcctatgagtccttcagttctccccctttctccatgacacaccaggagccatgtcagatgtgatttctgacctgggaccctgaatggcacaaggagaagaagtacggaattgggggagggtataagagggtttaagatgcgtgaaaaatgttgagtaggacatttcaagagatagttcaaataatatggtaccttttgtttacgtcaccacacttggcaaatttgatcgtatgacatctcatttgatgtctttgagatgacagatgttgtccctactgtagagctaagatcctcagagaggttaaatgacttgcctgtaatcactaagttagaaagtggcagagccccagaactaccccatgcagctgctttctagtttctaatcaggtgctttttcactaacaccatcttgcctctacaaactgacggcttacaaaatgctaccaaagggtaatactttttatttttgagatggattttcactattgtcacccaggctggagtgcaatggcacgatctcggctcactgcagcctccgtctctgaggttccagcaattctattgcctcagcctcccgagtagctgggattacaggtgcccgccaccatgcccacctagtttttgtatttttagtagagacggggtttcatcatgttggccagactggtcacgaactcctgacctcaggtgatctgcccgcctcagtctcccaaagtgctgggattataggcatgagccaccgcgcctggccaagggtaatactttttaatcagccaataagattcacatggaatttgcttatttttagtattcctgtcagtattgatggatttctttaaaagttttttccatagatctatttgcccatcacctctccaactcctccagcatctgccccctttcttccgcatacatattgtgatgtctaactgggccttaattatcatgaattttaaattggtggtatccatactaatcaggatttcctgtaattggaacattcttcacacttttgatatttgctgattgtcctctctatgcattttagaagtttcagactattttttctgagaaataactagagtctgtgcaagctgtgtcgtacattttgactgcaattttagtactgagtgttgcttgcttgaaaagaggcaggtaaaccaagttattgagtgcagtttcaaacacaagccaccactgttccatagatcaggggtccccaatccccaggccacagactggtcatggtctgtggcctgttaggaaccaggccgtatagcaggtggtgagcggcaggtaagcaatgaagcttcatctgtatttacagccgctccccatagtactcattactgcctgagctccgcctcctgtcagatcagtggcggcattagtttctcataggagcatgaaatctattgtgaacagtacatgcgatggatccaggttgcgtgctcctagtgagaatctaatgcctgaggatctctcattgtctcttatcactcccagataggactgtctagttgcaggaaaacaagctcagggctcccactgattctacattacagtgggttgtataattattatatattacaatgtaataataatataaataaagtgcacaataaatgtaatgcacttgaatcatcccagaaccacccctcagtggccccatccccagtctgtggaaaaattgtcttccacaaaagcagttcctggtgccaaaagggttggggactgttgccattggatcatgacacattactatcttgttgaattaaacgttgcaaactgcaacgtttgtaactgccagtaggcagtttttattttatttttcattttttatttatttttttacctgtgagcccacatccataaagttagcagactatgtcatagtcaagagactttgctttatgaactagctgatttagtttgctcacaagctttgaaagagtctttttttaaaggccaagtttaagacaccttagaccatagaaatatgtgtatttcctggccattcgatcatttgaaggccagattttatcaaaacaaatgaatcactgtttctccttccttcatcattccctaattggtttccaaaataaaatgattagtggctgcatttctcaactgcattgttttgattacagtcttactggctgtattgggtgagacattgggaaatgctttcataactggtgatcactgttgacggggttccctgacttcataaaggcccagattatgttaccccgagaaagtctttgaaggagcaagctctttcttatgcttttgttattaagttagggaaaatgactttaaataatggaaccttagttacaatgtaggttccactcttcttgagatttgtgttactttttagacatgacaaaagtgtgcattttagagttcctcttaccccaggaacaatggactcacttggctttcaaaagggcagaatatactgagtatttctgactgcaggtttcttctttctggtaccctcaaaaatacaccataaatagtagattaatctcccttttgctgtccgtgagtcccttcccgtttcttcagcactgcttgatatgactggtatggaggcctaaagctggctggcctagttagtgttacccaagtggtttcttgtgagcatccatttgcatgcagttgggccttttgtccattggtgaactgctccttgccttgaggtcctgtagctagtttgccactgagtatttccttcaaaaaacaggaaggatgccctgatattatgaagtgggtggttttagaattccacttcagatggcactgacctttccttaatacagctggtttcacttaatacattttgtttaaacaaagcctgttcctggaagtggttccagaatagtctgttccttgtagctgttcctttgctcttaattttaaaagtgttttcccgacagtatcatatgtgctcgcacgacagattagaaacttctgcttgaagtcatcacacttatgaattacgttgtgtccagttatgatatattgatgattgtattcagtagcttgaaggtttaagtgataactttattttgcaaaactgaccacattcttttgttgcttaggtgtctcccctttaagggattctgatgtctagcagtctcaatggacaaaacagataaaagagagaatgagtatttttcactttgtaaacatgaacaattcttaacaaaaaagccagagctggactaattaaataatcaacatgttttaaagtgggatagacatttctattttaggtatgataccacaatatttaaattttaggaaagactggatagaaatataaaataagatactagtagtcctgctctgacttttctaaaacaagtttatattactttatttaaaaatgtttatgagagtgccttttaaaaatagggatttataggctgggcgcggtggctcatgcctctaatcccagcattttgggaggccgaggctggcggatcacctgaggtcggagttcgaggctaaaaccctgtctctaccaaaaatacaaagttagctgggtgtggtggcatatgcctgtaatcccagctactcgggaggctgaggcaggagaattgcttgaacctgggaggtagaggttgcagtgagccaagatagtgccactgcactccagcctgggtcacggagtgagactccgtctcaaaaaaataataataagataaaaaatagggatttataaaacatatatgcaactcattaagaactttttggctggccaccatagctcatgcctataatcccagcattttgggaggccgaggcaagtggattgcttgagcccaggagttcaagaccagcttgggcaacatagcgaaacctcatctctacaaaaagctgggcatggtggtgcgttcctgttatcccagctacttggaaggctgaggcacaaaaatcacttaaatctgagaggtggaggttgcagtgggccgagatcaatcacaccactgcacgctagcctgatgaaggaaggagaaacagtgattcatttgttttgataaaatctggccttcaaatgatcgaatggccaggaaatacacatatttctatggtctaaggtgtcttaaacttggcctttaaaaaaagactctttcaaagcttgtgagcaaactaaatcagctagttcataaagcaaagtctcttgactatgacatagtctgctaactttatggatgtgggctcacaggtaaaaaaataaataaataaacaaaaaacaatgtctttctctgccttttgttaaaaaaaaaacaaaaaaactttttttgcctgtaatcccagctactcaggaggctgcggcaggagaaccacttgaacccgggaggtagaggttgcggtgagctgagatcacgccattgcactccagcctgggcaacaagagcgaaacttcatctcaaaaaaaaaaaaaaaaaaaaaggcactttttttttggccaggcacagtggctcacgcctgtaatcccagcattttgggaggctgaggcgggtggatcacgagatcaggagttcaagaccagggtggccaagatggtgaaaccttgtctctactaaaactacaaaaattagccaggcacggtggcaagcgcctgtaatcccagctacttggaagggcgagacaggagaatcgcttgaacccaggcggcaaaggttgcggtgagccgagatcgcgccactgcattcgagcctgggcgacagagtgagactccatctcgaaaaaaaaaaaaaaaaaaaaaaaaaaaaagaactttgaataaacttcgttgtgtcatattctatcgtaagatttattcttgtctttggagaacttagcttataattaattatattttaatgaataggatactttttgtttgttttgtttttgttttgagacaagtactcgctctattgcccaggctagagtgcagtagcatggtcttagctcactgcaacttctgcctcccaggttcaagcgattctcgtgcctcagcctccccagtagctggtactacaggcgtgtgccgccatgcttagctaattttcatatttttagtagaggcagggttttgccatgttgaccaggcttgtctcgaactcctagcctcaagtgatccgccctcctcagcctcccaaagtgctgagattacaagtcaccacgcctggcttccgtatttaagtattaggtggtgactccatacaaaatatttaacagcttgctggttaacatttaaatctttgttgctaagaccttttctatgtttgacagttattccaaacacgttccatataggaatagtttgccaaatagaagaacacgggatattcttctcccatggctgatgtgttgtgattctaggtgcatatttctgtttccaagaacacggacctgttctcaagttcaaacactgcatcaagagactgtgccccatgtcttttcacttttttccctctctctttctctccccttcccctccttgatttaatttcttcagcaggtcagaattgatacagcttccagaagaaatagtagaagtaggcaaaagattagtttttaattcttgttctgtcaaatactttttgattgaaattgtttttattacaaaggtagcatttgctttttgaaaaacaaaataagaaaaatctttttaatcacttcactattaagtttgttgaatattccctcataactttttctcctggctttttgagtatttgagacatttctttccacattgcagttttgaaacattctaccccacactcatacatgaaagtgaaggctctgcttctcagagtacagtttaatttactttgtggacatcattaacaaaaggcagagaaagacattggaccatactaattgtgggacttagaaaagctatattagtgatggttattaagtatcgcttgcagtggagtctgtaacatattcctatgaagttaatctaactactgagatagtgggagtgcagaggaggcatgctgtgagatggagtggtattttccagcatggcttttctgtttcttgaaaaccctacagcactttgccatggtttctcatctggatgaaataaagcacctgtaccttagtatgtcctgccatgcctttgtatggcatacttggctttgttctccaggcctcttcccacagtaacaacggattctttaggaattggaagggggggccgggcatggtgactcacgcctgtaatcctgggactttgggaggctgaggcgggtggatcacgaggtcaggagtttgagaccaacctggccaatatggtgaaaccctgtctctactaaaaatacaaaaaagaattagctgggtgtggtggggcatgcctgtagtcccagctactcgggaggctgaggcagaagaattgcttgaacccaggaggcggaggttgcagtgagctaagatcgtgccactgcactccagcctgggtggcagagactccgtctcaaaaaaaaaaaaaaaaaagaattggaagggaatggaggaagcaaggtggttaaacaaaaatcatctttacacacaccacccactctatgatgtatatgagttcagaagagcactttgctttatccttaatagaaatatctgtaaagccaggggagtcataaagctgtaggctaagtaaggtgccatgagaaaaggaggcttcacttacgccagtatttggagcagcgtttggcctcttggaggtgtttgcacccatcggagatgctccatagtgagatttaggataagtgcaaggtgagctttgcttttgtaaaatgcatgaagtgtgaccacgaaagggccatgggaaagaattattgatgggttacaggtgcatcgtttcaggcagattgacactaggaaagagcaaagagcaggtagaggtttgacagtttactcctttaaagtaatccatgtccaataacccatggaaagtcttcatgtacttctaaggggtagacataccctagtctaggtgctaatctaggttctatcatgtgttagctgtgaccctgggcaaataactttatcctatggcctcaatttcatcttgcaaaaaaatacggattagataatggcacttccttaaaaggtttgatgggatttcaatggaatattgcatagaaagtgcttgaggcattgtaagtacacagtaagtgaagtgttgaccattattaatatcatgatgataaagtgtgtaacttattttataagtaccatataattgaaatttgccaatagtaactcctcggagacttccagggaactctgtcaatcaaaaaaagctttgtgtaataatggacgctaccttgacagagtgtgttagtcaagagaggatacttatttataaattttgggatatttatacttttttttttttctttagagatggagtcttgctctgtcgccaaggctagagtgcagtggcgcaatctcggctcactgcaacctctgcctccccagttcaagtgattctcctgcctcagccttccaagtagctaggactacaggcacctgtcaccaggcctggctaatttttgtattttttaggagagacggggtttcaccatcttggtcaggctggtctcgaactcctgacctcgtgatccacacgcctcagccttccaaagtgctgggattacagacgtgagccaccgcacccaactataaaatgtatttttatagatacttattgaattttaggatgtgggctgggtgattattttttaaagtacttttaaaaaaattaaggtattatttacatataatatccacccatttttaagtatacattttggtgaattactgtgtgtcaatcatgtaacctcaaacacagccaagattataaaacagttctctacgctgctttggtgatggatacaccaaaatctcagaaaccaccactacagaacttattcatgtaaccaaacaccatgtgttccccaaaaacctattgaaaaaaaaaaagaacccaaaaccaaaaaacagttctctcaacattaaaagttttcctgtgcctttttccagtggattccttccctcagcctctggccccagacaaacacttatccactttctgtgtctgtagttttgtcttttcaagaaattcctatgaatggaaccatataaaagttatataaaaatcatagacttttgtatttgatttcttttactcttagcatcatttttttgagatttactcctgttgtatgtatttacatttcctctttttcttggtgagtaatattgcattatatgaatatctcacaatttatccattttactagtggataacattagattgcttccaacttgaggctattatagtacagctgctatgaacatttgtgtattcaccattgtgtgagcatatgattttccctaccttcttttctatttcactttcttttcctttttctttcctttttttttttttcttttttttgagacagtctctctgtgtcgcccaggctggagtgcagaggcacgatctcggctcactgcaacctctgcctgctgggttcaagcaattctcagcgtcagcctcccaagtagctgggattacaggggcccgccaccacacccagctaatttttgtatttttagtagagacggggtttcaccctgttgaccaggctggtcttgaatgcctggcctcagtgacccacctacctcagcctcccaaagtgctgggattataggcctgagccacagtgcccggccctttttcctttctttttttgagataggatcttgctcaatcatgcaggctggagtgcagtggcacacttggctcactgcaacctccacctcctgggttcaagcgagtctcctgcctcagcctcccgagcagctgggactacaggtgcgtgccaccacgcccagttaatttctgtgtttttagtagagacggggtttcaccatgttggccaggatggtctcgatctcttgacctcgtgatctgcctgcttcagcctcccaaagtgctgggatgacaggcgtgagccaccaagcccagctgacaatggattttctttgttttctccttcatctgaagatgtcttccctttgccttcatttttaaaggatattttctctgggtatagaattataatccgagagtatagaggttgacaagttttttggtattggttttagttttgggttgtgtctttttgttgttggcttttgttttgtttttgccccttatagatgtttcactgtcttttggctcatgtgttccgatgagaagtcagcccttcattgggtccttgttctcatctgtttaatacctgttcccatacctgccctttctctctcactgcttttaagatttgctctttatctttggttttggagtatttgactatgaagtgcaagctgctttgtttcttcttggtgtacattcagcatcttgcatcttcaagtatctgcgtatcattaagtttgggcagtttttggctcttgtttcttctaaattttttctaccccattctccctgtccctctccttttggtattgtagttacccactggaacacgtgacattatgtagcaagtctctgagtctgttcatttttttccttcagtctttttttttttttttgaaatggtctctctctgttgcccaggctggatggtacagcggtgtgatcacgactcactgcaactttggcctcctgggtttaagccatcctcctgcctcagcctctttgagtagctgggaccacaggcacgtgccaccacgcctggctaattttttgatttttactagaaacagagtcttgccatgttgcccaggctggtcttgaactcctgggctcaagcaatccacctgccctggtctcccaaaatgctaggattacaggtgtcagccactatgccagccttttcaattttttatctctcttcttcatcttggttaatttctactcatcttttttgaaatgcacatactgtccttttctttgtccattcagctgagtatatccagtgaattttttatttcaaaaagttaatttttttcagttctagaattgccatttaattattttttgttgttcctatttcccccattgagatttcctacttcttagctgagattttcattcattggaaacatgccttatactgcttcattgagatgattataatagctgcttaaaatctttgtctattccagcattttgttgatctgcaggttagactggcagttgaactaatttgtcccactgtcttgcttctttgtatggtgggtagttctggattgtttactggactgtatgaatgtcaaattctggatattctggattctgttacttttctctaatacttgtttggttttatcaggtggttttcttggctgggtttgaacacaaatgtgtttctctctgagatctttagtctgtagctgagctgctttgtgtctgtcccatgcatgagtggctcaagggtcagtcagggatgtgattgtacggggattggagatcttcccctgcctttttcccttctaggattacttcagtctatttatttatttgtttatttatttagagacagaagtcttcctctgtcacccaggctggagtgcaatggcgcgatctcagctcactgcaacccctacctcccgggttcaagcgattctcctgcctcagcctcctgagtagctgggattacaggcccgcaccaccacgcccggctaatttttgtattcttagtagagaaggggttttgccatgttggccaggctggtcacgaactcgtgaactcatgctctacccgcctcagcctccccaagtgctgggattacaagcgagagccactgcgcccagccggctctctttgttattcatagtttcctggcttctcttttctgagccacccagccaaaaatgctttgactttttctatgcatgtttctgtcatgtctgtgcatgacataaatcataatatcctaagacacaaaattgttaaaggcaataatttggaaacatacaacaataaataaaatggttatagagatgtaactttaaaaagttgaacattttgttaaaacgattcctgaatatgctggaaaattcagatagttaacaaaatattttgaggataaaaaggaaaggaatctgttatctggaggtagaataacttggccattttacagaaaggaaacaaattctgatttcactttttgtatatcatccatttgacaattttcaataaaaggtttattgaaaacggaatacataaggctggtgtttggacctttttcctaattagaaattgtccatgtctccaaagattattaactcagtttattatcagctaaagagatcttaaagttgactaaacacctggaaattaaaacttaggccaacacatcaaagtctttatgacttgaagtgttttaagaattaatgaggcaaagcacacacctgtggtcccagctacccaggagactgaggcaggagaactgtttgagcccaggagtttgaagctgcagtgagctatgatcatgccactgttcttcagcccaagagactgagtgagacctcttaagaaaaaaaaaaaaatgaccggacacagttgctcacgcctgtaatctcagcactttgggaggctgaggcgggtggatcacgagatcaggagatcgagacaatcctggctaacacggtgaaaccctgtctctactaaaaaaatacaaaaaaattagcagggcgtggtggtgggcgcctgtagtaccagctacctgggagcctgaggcagaaaaacggcgtgaacccaggaggcggatctcggcagtgagctcacaccagtggctcacacttgtaatcccagcactttgggaggccgaggtgggcagatcacctgaggtcaggagttcgagacaagcctgaccaacatggagaaaccccgtctctactaaaaatacaaaattagtgggcgtgtggcgcatgcctgtaatcccagctacttaggaggctgaggcaggagaatcgcttgaacccgggaggtggaggttgcagtgagccaggatcgcgccattgcactccagcctgggcaacaagagccaaactccgtctcgaaaagaaaaaattcatgagactaaatcattttaaaaagatgtcttttattacaatttctttcaattaaacagttttatatttttgaaattttaaacaatttgtgcaaacgagatcctactggacctataaaactaatgtagttaatttagaaggtttaaatcacgagaagttaagcccaaatcttgggttgatttaattgttgtgttaacattgtttttatatcataataaaatcagaaggatgcatagacttgtttttaagctaatattaacttctatttctagcccaaagagtcatctatcaaaagccagctcatattaagtagggggaccaagagggaggtctctcagttaaacaaagttattgacttgtctttagacaggcaagacagagtatctcctcataaggttttcttttaacctttttgttctgaagttaatatgtcttttaagtgaataatcttgtttataacaacattttcttttctgttttgtttgtttgtttgtttgagacagagtctcgcactgtcacccaggctggagtgcagtggcacagtcttggctcactgcaacctctgcctcctgggttcaagtgattctcctgcctcagcctcccgagtagctgggactacaggcacatgccaccactcccatctaatttgttttgtgtttttagtagagacggggtttcacaatattggtcaggctggtctcgaactcctgacctcgtgattcacccacctcggcctcccaaagtgctgggataacaggcatgagccactgcacccagctataacaacattttcaaagtggcacattttaatatgaataaaccttctacaatcacaggcctagaaagtttttctttttcttacggaatttcttgactgtttacttgtactagatatttcttcggtatattcataatgacagaacaattgtttatgattgattgatctccaaagtttcccaagaaaagagaaaaagtaggaggggaaggaagaaagaagtgagcagaagttggcttcagagagataggaagggccagttcccttctctgtttaaggaggggagaagacttagatgcagggaaactcattttgacatgccaactcaaaccacagaagccagagtcagttcagctggtttcagtagtaactcaggaccttgacaattctgttaagccatgtcctttaaaagccagctcttattaagtagggggatgaagggggaagcccttcagttaaacaaagttactgacctgtcttttagacaggcaggacagaggatctcctcatgaggtttttttaacctttttgttctgaagttaatgtgtgttttaaatgaataatcttatttataacaacattttcagcgtggcaactgcagtttcagaatggtggaattataccagtcagagagagatgcaaatgatttaaaataggaagaaagcaggtgtctggcccagaggaccagattaagaagaccccatgagagttacaatagttagtgaaaatggtgcttctgcaaacctcatgtctacagaagctggtcaaagaccagatgccaccaggtagaatcccagcaaactcttcaatggtagatatctgtcaccatccttaggaggtaggtctgtggaagctcactataataccatttgcttaacagatatacaaacatggatcagatataatttcaacccacaaggagctcacagtctggctcttcttttgaggcaaaaagactaaagctgttgcctttatggtaagataaatctgccttggagtcaatccaaggtgatttaattactgtaggtagttgtaccaataaggcttgtatcccagagaactccatattgcatttaagcttgttagtaagccaggccagctctatttcctgtgaggactttaaaaaaaattgcattcacacatttaaaaattagcataagcagggtgcagtgatgcacgcctgtagtcccagctacttggtaggcagaggtgggaggatcacttgagccccagaagttcaagaccagcctggacaacaaagtgaagtgaagactgtctcaaaaaaattaattatgacataaaatgttatatgtcttaatttacacaaatataagtatatacttttaaatcccattcttacacacaaaagctagcatactgtgtaaagtattctggacctacacacctttatttttttaacataacaatatgtcttggatacattttcctatttgtctatagaaagtttcatcattattttaaaaaatttgtttttggctgggcacagtggctcatgcctgtaattccagcactttgggaggccgcggcaggcgaatcaggaggtcaggagtccgagactagcctggccaacatggtgaaaccccatctctactaaaaatacaaaaacttagctgggcgtagtggcgggcgcctgtaatcccagctacccgagaggctgaggcaggagaatcgcttgaacccgggaggcagaggttgcagtgagccgagatcctgccacagcactccagctggggcgacagagtgagactccatcttaaaaaaaaaagtttgcttttatatttcatacctgcatggtattctattgtgtgagtaggccatcatccagtggtcttcaaactttcctgtgtactccgtaacagaatttgttgttttgacatgcagtctcactctgttgaccaggctagagtgcagtgccacaatctcagctcactgcagcctccacctcctgggttcaagagattctcatgcctcagcctcttgagtagctggcgcatgccaccatgcttgactaatttttgtatttttagtagagacgggatttcaccgtgttggccaggctggtcttgaactcctgacttcaagtgatctgcccgccgtggcctcccaaagtgctgggattacaggcttaagctaccacgcctggtcttctaatagaatttttaaaaactgtatttacccccttgcacatttaaattgacatctaagatttttattataagtttaaatagttgtaaaggatgtattttccattatattttatacattccttaattttatatatatatatatatatatatatagttttttttttttttttttttgagatggagtctcactctgtcacccaggctggagtgcaatggtgcgatctcggctcaccgcagtcactgcctctagggttcaagagattctcctgcctcagcctcccgagtagctgggatcacaggcacccgccaccatgcccggctaatttttgtatttttagttgagatggggtttcaccatgttggtcaggctggtctcgaactcctgacctcaggtgatcccccccacctcagcttttcaaagtgttgggattacaggcgtgagccactgtgcctgccctcccttaattataatttaaaaaatttttgcagatgtagatttatataaattggcaagccagttctctttatcaaattaactgatcaaaaaaaaaaaaacagattaactggtcaaacatagatttactttctgtcagtaaaattttgacttcatttttttaaatcaaataagcatgttaacccggtattgctgtgacaacctttatcctaatttcttttcttcttcttcttcttcttcttcttcttcttcttttttttttttttgaaatggagtcgtgctctgtcacccaggctggagtgcagtggcacaatctcggctcactgcaacctccacctcccaggttcaagcaattcttctgcctcagcctcccgagtaactgggactacaggcatgcaccaccacgcctggctaatttttgtatttttagtagagatggggtttcaccgtgttggccaggctggtctcgaactcctgacctcaggtgattcgcccaccttggcctcccaaagtgctgggattacaggcatgagccatcgcacccagcttttttatcccaatttcaagatgggtgggcaggtaggtaggtaggcaggtgggtagatagatagggccttcagacttgcctcgcattcatcttttacataaaataagacagtttcaccttgaacacttctgtggtgagactgtttagtcttgtagctctaaactccagccatactctgatgactcccacatttataaatcccagatttgtatactcaactacttatctaacaggtcaaaactgaactcttaaaattcttacatttgtgtccacacatgattggctaagctaatggggctcagatttaccctgtcacctgaaacaactgtaaaactggagaaaatatgtcaaactctgaagttattaggtctaaggtgattaagaacagcgaatcctgagacctgagaaatagagccctatgattgctctgatttaatgctcggagaaagtttccagaccgcggtgcggggagaaggaacatcagcaggccccagcagtctctcctcattgaagaggtaaaatgaaaatccagggcagctggggcagctagagttcacaggcagagaaacaaagaggcaagagatgcacagagaagagaacactggcctgcagatgcccagggagcccactcgagtattcggttgagtactgatcagtgcacccatgtgaggaaaccccttagttcagggaaggagccactcaaaaggattagagagaaccatttacggagttcacacagggccagaaatagttcctgttcccagtagcagagtagaacatttcatgattcaggggtattgattggagtactaagaagagttgtattagtgaaggttcttgagagagagagagagagagagagagagagagagagagtgtgtgtgtgtgtgtgtgtgtgtgtgcacgtgtgaagaaatttattgtaaggaattgccacgtgattatggaggctgataagtcccaaaaatctgcagggcgagtcagcaagatggagacttaggagagccaatgatgtggctatagtccaaaggctgacaggctcaagacccaggcagagccaatgtttcagttcaagtccaaaggcaggaaaaaagttgatgtcccagttcgaaggcagttaggctggaagaattctcttttactcaggaaagggtcagattttttgttcaattcaggcctttaacagattgaatggggctcacccacattagggaggccaagctgctttacgcattttgccagactaacgtttgaccaaagatctgagcacgtatggcccagtcaagttgacacataatgttaatcatcacaaaagtcttgcctcaatagttgggaaaaattaatcctagaataaatgctattctggtcttgcttagcaaaggttaagagcaagaccaaaaagatcaaaccttttccaaacaaaagctgaagaatatttttagggatacaaaaccatctaggaccgagtgtggtaaaatgcacaatgtttaccagccattccagaattactaggtatgagcagaagtagtaacatacaaccaataactgaccagaaatgagacagattatataagtagtacattacagacattagtcattataattgtattccatgtgttcagtaagctaaagaaaagatttaatatgttaagtaaagacatgaaagatgatggctgggcatggtggctcacgcctgtaatgccagcactttgggaggccaaggtaggtggatcacctgaggtcaggagttcaagaccagcctagccaacatggtgaaaccccacctctactaaaaatacaaaaattagctgggtgtggtagcgtgcacctataatcccaactatacgggaggctgaggcaggagaatcacttgaacctgggaggcagaggttgcagtaagccaagatcgtaccactgcactccaacctgggcgagagagcaagattccgtctccacaaaaaagaaagatacagagatgaaaaatacactgaagactgtcagaataaacattgcacaagtaaagatttgtgattttgaagacttaaccatagaaactatccaaaatgaagcagaaaaaaaaaagaaaccctgaaaaaaatacatgaacacaacatcagtaaagtgagggacaacatcaggtagccaaatgtgtgtggaattggagtccctgaaggaagggagggtatgagggaccaaaaaatatatatagagagagaaaaaaaaatggctgaaaaatttccaagtgtaatgaaagcagtaaacacacagatccaagaatttcaaggaactccaagcacaggaaacatgaagaaaaactatatactaaggcacatcttaagcaaattgcttaaaaccatggtttaaaatggccaaagaaaaagatacattatatacttaagatcagggtgacaccagatttctcattggaaacaatgtaagccaggttaacagtggaacaatacatttaaagcaaagaaagaaaacagttgtctacctagaattcttttctcagtgaaaatacctttcaaaaatgaaggcaaaataaggtctctttcagactttaaaaaaaaaaaggaagaatttattaccagtagatatgcagtacaagaaatatcaaaggatgtaattaaagcagaaagagaatgataactggtagaaaactggagccaccaggagtcccaggctgcagtgagctatgatcgcaccactgcattccagcctgggtgacagagtgagaccctctgtctaaataaacaaacaaataaaagaaaactggagctataaaaataaatgaagacaatgcaaagggtaactaagtggataaatacataagatattttttctttttgtttcagtctcattaaaagatatgtcttagaggtaattacacattgtagcatttgtaacttacatagaagtaaagtttatgacaatagcagcacaaagactgggagtgggagaacaaatatactcttgtaagctttttacactacatgtgaagttgtataatgtcaattgaaggtagactgtgataagttaaagatgcatatgataaaatctatagtagcagagttatagctaatgagccaacaacaataaaaagttgggatataatcccaacactttgggaggccgaggtgggtggatcatgaggtcaggagttcgagaccagcctgaccaacagggtgaaactttgtctctactaaaaatacaaaaattagccgggcatggtggtggcacctgcccgtaatctcagctactcgggaggctgaggcaggagaatcacttgaacccaggaggcagaggttgcagtgagcggagatagtgctactgcactgtagtctgagcgacagagtgagactccgtctcaaaaaaaaaaaaaaaaaaaaaaaaaagttgggataaatatctttaaataatccaaaagatggcagaaaaaaaaactaaacaggaaaagcaaacagagcagatgggacaaatatgaaacaaagagcaagatggtaggttaaaattcatatcaataattaattcaccattaagggccaggcagagtggctcatgcctgtaatcccagcattttgggaggtggattaggaggatcacttgaagccaggagtttgagaccagctttggaagccaagtgagactccatctctacaaaaaaaaaaaaaaaaaaaaaaattagccaggtgtggtggtgtagttccactcaggaggctacggtgggaggatcacttgagcccaggagtttgaggctacagtgagctctgatcacaccactgcactcctccagcctgggtgacagcgagattccatcttaaaaaaaaaaaatcctcattaaaagcagacattgtgagattggataaaaaagcaagacctatttatatttatatgctgtctacagttatcccactttgaatataaaaatacaaatacgttaaaagcaaaagagtggaaaaagatgttaatatgttaacattaatgaaaagaaaaccttagtggcatattaaacaaactatattttaaaatgaatgtcaccaaggataaaggagaattatttcataataataaagagatacattcatcaagacataattctaaatgtttatgcatgtattaacagagattcaaaatacaaacttttcaaggagaaataaatctgtaattatagttgaaggtttaacaactctctcacaaaaactgatagaacaagtagacaaaaatcagtgaggatatagaagatttggacaatataatcaactgacttgacttaattgatgttcagtagaacattcgacccctaaacagcagaatacacgttcttttcaagtgcatatggaactgtttccaagacaaatcattttctgggccattttaaaagcctcagtagacccggcgggttggctcacgcctgtaatcccagcactttgggaggccaaggcgggcggatcacctgaggtcaggagttcgagacaagcctggccaacgtggtgaaaccccgtctctacgaaaaataccaaaaattagctgtgtgtagtggtggatacctgtaatcccagctactcaggaggctgaggcaggagaatcacttgaacccgggaggcagaggttgcagtgagccgagattgcactactgcactccagctgggcaacagtgagactccgtctcgaaaaaaacaaacaaacaaaagcctcagtgaatgtaagctgattcaatttgtagaaagtatgatctctggccaggtgcggtggctcacgcctgtaatcccagcactttgggaggctgaggcgggcggatcacgaggtcaggagatcaagaccatcctggctaacatggtgaaaccccttctctactaaaaatacaaaaaatcagctgggcatggtggcgctcacctgtagtctcagctactcaggaggctgaggcaggagaatcacttgaacccgggaggatgaggttgcagtgagccgagatggtgtcactgcactccagcctggctgagagagcgagactccatctccaaaaaaaaaaaaaaaaaaaaaaaagaaagtatgatctctggccacaaggaattaaatgaggaattaataacagaaaggtatctggaagatctttcaaatatttggaaaataacataattttaagtaaatcatgggtcaaagaaaatcaacagcgaagtaagtaagtatctggaactgaatgaaggtgaaagtgccacataaaatttgtgtgatggagctaaagggaaatttatatagtgcagatggtccctgacttatgacgtctcaacttacatttttcaattttatgatgggtttttcaggatgtaacccaattttaagttgagcatctgtatcagaaaagaacaaaggtcccaaatcaatgaccttggggtcccacttttagaaattagaaaaaatgaagactagtgaaaccccaattaagcagaagaaaaagccagtgtggccaggcagggaggcccatgcctgtaatcccagcactttgggaggctgaggcgggcagatcacaaggtcaggagattgagatcatcccggccaacatggtgaaaccccgtctctactaaccatacaaaaattagctgggcgtggtggcgcttgcctgtgtaatcccagctactcaggaggctgaggcaggagaatcgctttaaccagggagtcggaggttgcagtgaaccgagatcgcgccattgcactccaccctagcgacagaacgagactccgtctcaaaaaaaaaagaaagaaagaaagaaaaagaaaaggccagtctggaaatcaatgaaacagaaaaccagtacagaaatcatgaaaccaaaagctagttatttgagagagcaatgaaactcataaacctctacccagactgatcaggggaaaaaagggaagacaataactgtaatatcagcagtgaaagagatgacatcacacagattctaaagatattgaaagtgtaataactgaatattgatcagcaatctagaagaaacagattccttgaatgacacaaactaccaaagttcactcaagaagtaaccatctgccgggcgcagtggcttacgcctgtaatcccagcactttggtaggccgaggtgggcggatcacgaggtcaggagaccgagaccatccttgctaacacggtgaaaccccgtctccactaaaaatacaaaaaattctccgggcgtggtggcgggcgcctgtagtcccagctactcaggaggctgaggcaggagaatggcttgaacctgggaggcggagcttgcagtgagccgagattgcaccactgcactccagcctgggtgacagagccagactctgtctcaaaaaaataaaataaaataaaaataaagtttagtaaaataaaaaaaatcagtaaaatacaaataaaatttagtaaaaataaagctgattctaaaatgcatgtgcaacagaggatctagagtagccaaaataagctcctctgtctgacttaaagtcttaattaaaataatcagacaggccgggcatggtggctcacgcctgtaatcccagcactttgggaggctgaggcaggtggatcacctgaggtcaggagttacaaaccagcctggccaacatggtgaaaccccatctctactaaaagtacaaaaattagtcaggcgtgatagcacacgcctgtaatcccagctactcaggaggctgaggcaggagaatcgcttgaacccgggaggcggaggttgcagtgagctgagatcatgccaccgcactccagcctgggcgacagagtgagactctcaaaataatgaaataaaaataaaaaactgaacttcatatcttgtccccagatctgatatagtcacttcttcctttgttcagttaaacccagcttcatgtttctgcttgcccagggccaataactttgggatcttccttgactcttctttttctgtcaaaccccgtaccagtctttcaggtaaccgtaacttcagagtctatccaggtcacctctgcttgtccaagcccctgtcatctctcacttggatgatttcattagcctcttggccagggtccctgcttctgctggtatttccttagtttcttctccctacagcagccagagctaatcattttaaatgtcatatttctgtctcgcctcagctgcaaaccttccagtaccttcccagctccttctaaataaacaccagaggccgggtgcagtggcttatgcctgtaatcccagcactttgggaggccaaggtgggcagatcacctgaggtcaggagttcgagaccagcctggccaacatggtgaaaccccctctctactaaaaatacaaaaattagctgggcgtgatggcgcctgtaatcccagctacttgggaggctgaggcaagagaatcgcctgaacccaggaggtggaggttgcagtgagccaagactgcgccactgcactccagcctgggcaacaagagtgagactctgtctcaaaaaatataaataaataaacaaacaagcaccagagccctggcagtcacctgtgaggcttcaccccgtctccccacccactataacctctgacttacctccttttacactccttcttgctgactctgttccttccacattggcctctttgctcttgcttgaatgatccccagtcatcctccctgcccagggcctttgcacttgctgttctctgccaggaaggtgcttcctccgtagttcactcttcacctcctttgggtctttgctcagttgtcatcttcagtgatggctcttctgatcaccttatttaatttttattttttaattaaaaattttttttgtggagatgtcttgctatgttgcccaggcttatctcaaactcctggactcaaacgatcctcctgcctcagcttcccaaagtgctgggattacaggtgtgagctaccacacccggccccgatcaccttatttaaaattgcagctcccagcccccaaccccagcatacccattcctctttttttttttttgagacagaatcttgctctgtctcaaattccctccagccatgagccctgaaatgaaacaagttatctatttccaaaacacaacagtggggcaggcataggatagacattcccattccaaaagggagcaataggcaagaagaaaggggtagctggtcccaagtaagtccaaaacctgagacagagtcttgctctatcgcccaggctggactgcagagtggtgcgatctcagctcactacaacctccgcctcccgggttcaagcgattctcctgcctcagcctcccaagtagctgggattagaggcatgcaccaccacacctggctaatttttgtagttttagtagaggcagggtttcaccatcttggccaggctggtctcaaactcctgaacctcaggtgattccccccgccttggcctcccaaagtgctgggattacaggcgtgagccaccgcctggtctccctcattccttttgttatcagtcatccctcccagccctggcaactgctgctcactttcctgaccttagaattttgcttattacagaatgtcatataagtagaattataaagtatctaagcttttaagtcctaatgcatttaagatctgtaaaaagtaaagtagaggttcctcttcaaagactttcctccccatctaattaggaataaatagtaacttctcttagaagaaaaatttattcaaagacctgtgctaacattcttaaatatctgctagccgtaataaagaaatcaatgtactttatattcttagctctcacaatttagcctaaatatttgccctggcatgcttatactggtccaagcaagcattaggtcatggcctgttcctcttccttatttgaaggtgtttttacctttctcagcactccacaagttacttcctccttcctttgttctcctctgcctttgcctcttttaaaaagttctaagttcctagccaatcaggacaaatacagaatgtgaggtcctgttccagccaatggaaactggacacagcagtagggtggacgcgtcaggttgtaaatgaccctgtctcctttgttcagtgtactctcatggcaaaactgctggtgagtgtaccctttctgcagaaagtaaaaaatggccttgctgaggaaattaaatttatgttcaagtgctttttcttcagggcaccagggaacaagcatttctaacagatccatatgtgtcgctgcatgtaatcagtggttcattcctttctattgctgagtagtgttccattgtatggatgtacccgtgtattgatccatccatccactgaaggatatttgagttgtttccagtttttttgtgattatgaataaagccactgtaagcattcacatagaggctttggtgtggacataagttttcatttctcttcggtaaataattaggagtagaattgctaggtcgtaggataagtatatgcttaacttaggagaccctgccacagtattttacaaagtaagggtgctattttgcattactaccagcagttcacaccatatgtattcacaccagttgctccatttggtcttcgttctgtgacttgtctctattctcttaacagtatctttagaacagcagaagtttttgattttgatgaaattcagtttatcgggccaggctgggtggcttatgcctataatcccagcactttgagagaccgaggagggtggatcacttgaggccaggagattgagaccagcttggccaacatggcgaaaccctgtctctactaaaaatataaaaattagccatacatcgtggcgcatgcctgtagttccagctactcaggagtctgaggcaggagaatcacttgaaccctggaggaagaggttgcagtgagctgagatcatactgctgcactccagcctgggcaacagagcaaaactccatttcaaaaaaaaataaaataaaatttcagtttatcagtgatttctcttaagtttcatgcattgggtattgtagctaagaaatcttcacctaactcaagtttacaaagattcttctgttttttttctagaagatttataagttttaatttaacttttaggcttataattcatttcacattaaatggtgtatgtggtgccaggtattgctcgagagtcatcatcttgcataggggtttcggatgttctagcaccatttgttcaacagatagcctcttttcattaaattgccctttcacctttgtggaagatcaattcagcatgcatgtatgggtcacttgtatgtttttaattgatttctaaattctgaaaggaaaatgataaaaaggaagattctttcactatatctgcatttccaatttctcccccaagaacgctttcctaacacctgcaggcagaactaaccactctgggcccctgtagctgttgtgcgtatgtttattattgagtttttctggcctttgcagttctttcagtgtctgattctccctctctctcagcttctttctcaagactgtgcatccttggaggtcagaaattgtctcatcctgccgggcgcgatggctcatgcctctaatcccagcactttgggaggccgaggcggttagatcacaaggtcaggagttcgagaccagcctggccaacatagtgaaaccctgtctctattaaaaatacaaaaattagctgagcgtggtggcacatgcctgtagtcccagctactcgggaggctgaggcaggagaatcgcttgaacccaggaggcggggaggttgtagtgagctgagattgtgccactgcactccagcctgggcaacagagcgagactccatctcaaaaataaataaataaataaaagacaaaataaattttctcatccttttttgtcatcttcatcacagctgcctctctaatgttcgttgaatgaaagggccattcccaaatctctgataagtcaagcatttttaggagagctaaaccagccaaatgagaccaggaagtgaagaaaaatacctttttttttttttttttttttttggagacggagcctcactttgtcacccaggccggagtgcagtggcacgatctgagctcactgcaacctccgcctcccaggttcaagcaattctattgcctcagcctccccagtagctgggactacgggcacacaccaccatgcccggctactttttttttgtatttttagtagagatggagtttcaccgtgctggccaggctggtgtcaaactcctgacctcgtgatccgcccgcctcagccttccaaagtgctgggattacacgcgtgagccaccgcgcccagctgaaaaatacctactttttttttttttttacagcaggaggtgtttctgcttctactttgctgtgacttctgtttctccaggcattcctggtatggacatttataccaggtgttttggtcattggtgggctctcagcttcagaggacacttggcttctctataccctatctttggtgacttctgcttgttggacttcagtcactgcagttcacaagtttcacactcatgaaatatttattgttaattaattccaatatttaattgattgcttctctttctcagcactttggaaacatgtttactacctagacattttcctacagtagatttttaattcttaacattttgatcttaagcaatttaccatgatacttggtttccatgagagatttaacagttggaactgtactgcccataagatgcaggtggggtcatggtatgtagttgggaactctacaaatggcagcccttcatgcctttgcaaaggctgcaggttggaaagctgccattacttgtgagggcgtccaaatgcttcctgtgaatggaagatgtgtttctgtgcctcactgtcttcactgtgctggattgctggctttctcagatgtctttatttgagtcaacctgtattccatctccccactcccacccagtcttgatcatctcatttgtgtgtatacaaccttcccctcacacacacctctttgcagagtttcgttgcactgggcgttgggaggagaggcgtcagagttgggtggaatcatttcaggctgactgtccagacatagctctcattagaagcatcagtaaataagctgaaaaccaacaacacgtacagcacagtctttctgtgtttgcagcttggaactgagcagccctcactgggtgcatttctaatcctttgtctcatcatttatatgacatccacttagaaaaaggtgttaaaatcatataacatattgctttttccccttttttattagcagttttactgaggtgtaatttatatgccataaaatttaccatttgaatgttcaattcaatgatttctactaaatttatagagtgtgcaccataaccacaatccagttttattttttatttttttttcgagacagagtctcactctgtcactcaagctggagtgcagtggtgcaatctcggctcactgcagcctccacctcccgggttcaagcgattctcctgcctcagcctcccgagtatctgggactacaggcacgtgccaccatgcccagctaagttttttgtattcttagtagagatagggtttcaccatgttagccaggatggtctcgatctcctgacctcatgatccgccagcctcagcctcccaaagtgctgggattacaggcgtgagccaccgcacctggccccacaatccagttttagaacatttccagcatccccaaaagatcccttttgtccctttgcagcagtcctacccccacttccagccccaggcgaccattcatttgctttttctatagatttgtcttttccgtacgtttcatgtaaatgaagttttatacaatatatgaccttttgtgactgttttttttcccagcatgtttttgaggtttatctgtattatagcacgtctcagtactttgttccctttttatcactgagtattattccattgtacggacatacatttttctctattcactagttggtgaacatttggattgtttccagttttggtcatcattaacaatgctactatatatatccatgtataagtctttgtgtggatatacattttcatttctctagggtagatttctagaagtaaaattgctgagtctttttttttttttttgagatggagttttgctcttgttgcctgggctggagtgcaatggcataatcttggctcactgcaacttccgcctccctggttcaagtgattctcctgcctcagcctcccgggtagctgggattacaggcatgtgctaccacacctggctattattattattattttttttttttttttttgagacagagtctcgctctgtcacccaggctggagtgcagtgcgcgatctcagctcactgcaagctctgcctcccgggttcatgccattctcccgcctcagcctcccaagtactgggactacaggcacccaccaccacccccggctaattttttgtatttttagtagagacgaggtttcactgtgttagccgggatgctctcactctcctgacctcgtgatctgcctgcctcggcctcccaaagtgctggcattacaggcgtgagccaccatgcctggcaaattttgtatttttagtagagacgaggtttcaccatgttgatcaggctggtctcaaactcctgacctcaggtgatccacccaccttggcctcccaaagtgttgggattacaggcgtgagccaccacgaccggtcaaattgctgtcttatagtaagtttatgtttaactttttaagaaactgccaaactatttcctaaagtgactgtaccatttacattcccaccagcaatgtgtgagtgttccagtttttccatgtccttgccaatagttggttttgtctgcctacctatccccgcccctgcttttttttttttttttttttttttaagagacagggtcttgctgtgttgttcaggctggcctcaaactcctgggctcaagtgctcctccctagtagctgggactataggcacacaccagtgtaccaggggttgtctgtcttttgattatagctattggaatgggtgtgaagcagcatctcgtgattttagtttccatttcttgaatgactaatgatactgaacatctttttatgtgcttattagccatttgtatttcatctttggtgacctgtcaattcaaatcttttgcctatttttttttattaagtttgtgcactgtcttattatcgagtggtaagagttctctgtattgtgggtacaagttcttttttttttcgagatggagtctcgctctgtcacccagggtggagtacagtggcacgatctcagctcactacaacctctgcctcctgggttcaagcgattcttctgcctcagcatcccaagtagctgggactacaggcttgcaccaccacacccagctaatttttgaatttttagtagagacgggatttcaccatcttggccagacgggtctcaaactactgacctcgtgatcctcccacctcggcctcccaaagtgctgggattacaggtgtgagccaccgtgcccggccttccaagttctttatcaggtatatgatagcacatgtagctttttatcttccttacaccagtgcaagtttatagaaaggaaaagggatagttaatagtaatcataataatgtttaatatttgaatgttttttaggagctggacactgggctgcatgtttcacggggatgatttgggtcactcttcaattttctaaaggttacaggactgtttcaaacacctctccttctattaacagttttcaatggagaaagaaaacaaaagattgatttggggaattcttaggttaatgcgagttagaactgaccttttaacattattaccataaggactaaatggctgttacagacccaaaataggagcaattcaaacaagcgagatgcttctctctgtaacaggctgacagtcgcggtcctggaggggcacgatggctcctcagggtcagacacctcctgtcccttactctgtaaggcacagcttctacctcaggatccaaaatgcccacgccagctgccatggcccctcacaggcagtggacaccagaaagaggagagggagtgcgtgcctgttgctttgaagaacctgacccagaagtcttacacagcacttttgcccacataccatcacttagtcatgtggtagtgcctggccacaagagagactgggaaatggagtctttattctggggtgatgtgtcccatctgcaactgaggggttaaggcctaaaacttagggattgaaggcaggagaaaaaacagatgtcgagagccagtgttgggattgcagggtcctgtgtgggattcctgttcattttcatcaaagaaagtctagttgatatgcaattgttggcctaagtgttattgaggagttaattttactgttgaattacaccagaacatttgtcatgtgaaataactataaatacgactgattattgcctagtgtattacagttctctccagagacacaggaaacaatagggtctgtctatcggaatagatatcctaaaagtgtatcttttgaagagattgattataaggtattggctcatgagatgatggagcttaagaagtcccacagtctgctctctgccagatggagacccaggaaagctgctggtgtagtttgaaggcctgagagctgagggccagtgatgtggattccagtctgaaggtctgagaacccagagggctgagggcaggagaagatccatgtcccagctcaagcaggcagagggagggtaaatccaaccttcctttttctgtttttttgttctaatcaggccctcaacggactggaggatgcccagccaaagtggggagggccatctgcttaggcagttcaccaattcaaatgctagtctcttctagaaacaccctcacagacacacctggaaataatgtttaagatctgggcatcctgggggtctagtcaagctgacacatacatttaaccaccacacttagggaatatgaaaataacttagacattaaatttgattttggtgttgctgtaaagaatacagatcttaggcaccagctcgtaggaggggtggtaaacaaggaggacagcttttaccaggttgcctttggaagcaaaactctgctttgctgttttgttttcaagcggctgcatggccactgagcgagccctttcctgccatcaccacagtgccacttagtgaacagtttctccaaggttaactgtagctgctcttgttcagttaatatgtagttctggattaatatgccacatctgtcactttaaggaagaaaaagagcagttccgtttagagatcccattgctcctctaaggacagcagtcatttctaacaagcagagggaagaaatcttctggttccatttgtcctttgtgtgtgttgaaaaccttgacaacaaaacaaattggtactgaatggtttgaagaaataaacattaactcccctttagtatttcatttctagggtttccagccttggtaacaattaccaagaactttgctgtcatggggtacagctctaggctgctgacaggatcttcatactggaggagactatacttttatagccaattccaactgccccagagataacttggataaacactggctcctccactacctcctaatccctgctgggttttacactgtggggaggtttagacaacttgttttctttcccttttagcccttctctctacactcccctccagctgccttcttcccccacccccaaatgtaacgtgatctcctaggcctgctctgctgcttttgcagattcttttagtcttagagaaagagaggaaaatattaaccattggtttaccaattcaaagttaacaacattttaaacaaaaggagcttgtcaataaccagggcttgggcttttcttttatcagttcctcctacttggctgagtttacctcatcataaatcttatcacacagataataatttgacagctttagggtttttgcagcattgctattttctattgcaacaaagctgtaacattgctatttttgatgtatttgttttatagatatcttaatcttcaatattcagattaaaaacaaacaagacttagtgatttaaaattatttggtaaaaaggtaaagggacagagacatctcatgaaaacatggcaaaatctctttaagtttaattcaagcacttagagtttaataagaatatcccaaaccatttttgcttaataatatttctgtttataattaaaccttaaggtacagtgttgtaactggatttaagaatttagagttttgttgtttcttcgccatcagcgaaattaagatttaaaacctatagtttgcaacaaattttagtttttcagcctagtgtcctaaaacttgtctgtcatgggtacctagtaggtgtcatgtcacaggaaagggatctaacaagggagtttgaagataggggttttccttgctctgccactaacttgctatgtgacctagggcaagttatataacctatctgtgtcacagttgtctgaaatgcaatatggggaaaataaattcttaaaatgacaataaaaagatttcttttttttttttgagacagagtcggcgcaatttcggctcactgcaacctccacctcctgggttcaggcgattctcctgtctgagcctcctgagtagctgggattacaggcacacaccaccacgcccagcaaatttttgtgtattttgtagagatggggtttcgccatgttggccaggctggtctcaaactcttgagctcaaacgatctacctgccttggcctcccaaagtgctgggattacaggcatgagccaccacgcctggccaaaatatatatatacatattttaagtgaagatgtgtaaggactaaaggagcccaaaggagacagtaggggataagaaaggcaaagagagtggtaatagatttagcagaatcaaggatgccaaaacctcttctgagagagaccttgattaagagtgagctggtttgcctgtaagaatctgcggaaaggtcagaaattagagacattagtaccacagaaagcaggggatgaggcctgaagctgaaatcaaggggatcaattgagagcctataaaaggagggtttagattcttcaaacccctcccaaccccacagagtcagatgaccacctctcctaaccacctacaggagaccagaggcattatattgagaaatgcccggccgggcgcggtggctcacgcctgtaatcccagcactttgggaggccgaggcgggcggatcacaaggtcaggagatcgagaccatcctggctaatgtggtgaaacaccatctctactaaaaatacaaaaaattagccgggcgtggtggcgggcgcctgtagtcccagctactcaggaggctgaggcaggagaatggcgtgaaccctgaaggcggagcttgcagtgagccgagatggcgccactgcactccagcctgggcaacagagcaagactccgcctcagaaaaaaaaaagaaaagaaatgccccgtagaggctctgcactcaggagcctgacccccagcatgggtccgggtaggccattggccgaaaatagtggagtgggcaaagagcagattttttaaaagtctgcatactgaatagtaagattcccagccctcttctaatacctgctagccaggggcctaataaggaagagattgaaatattcttttctagggggaaaaagttgaatgaccctagagaaaagccctacagataccaacatttagggattctcttgaaaaagcgagtttaccatctcctttcactgaagcttaccagtggctgtgccccttccacgcatacaaaactaacagtcatcttttagttgctcattcatagagagtgagtggcctgccaaatctctctaggcattagaggaaggtctctaacctgatattaatagataaagggtaaaacaaatagcagaaaacaggaacttggtggaaataaagacaatgcagtcaacagaggaagagtttaaaagaactattcagcttgggcaccatgactcacgcctgtaatcccaacactttgggaggctgaggtggacagttcacctgcggtcaggagtttgagaccagcttggccaacatagtgaaaccccatctccactaaaaatacaaaaattaactgaacatggtggcaggcacctgtaatcccagctattgggaggctgaggcaggagaattgcttgaacctgggaggcatagcttgcagtgagccaagattgcaccaccgcattccagcctgggtgacagagtgagactctgtctcaaaaataataaataaataaataaataaataaataaataaataaagctatgcatttcccacaaatactgcttaaaaaaaaaagaactattctttgctatccttggagagagagattgcaaatgtcagaaaacaggatgcttttaaaaacaataacaatcagaataagaataaaaatgaattatttttcttttatttatttatttatttatttttgatacatggtctctgtcacccaggctggagtgcagtggcaagatcacagctcactgcagccccaacctgcctcagccccccaagcaactgggactacaggcacgcaccaccacacctggctaatttttaaattttttgtagagagatggggtctcactatgttgcccaggctggtcttgaactcctgggctcaagtgatcctcctgcctcagcctccccccaaagggctgggattataggcatgagccaccacacccagcaagaatgaattgtttaatattaaaaacattatagcccaaatttaaaatccaacagaagatgtggaaaattgtctcagaatgtattgggttggtacaaaagtaattggggcttttgccattttaatgacaaaaacgttgattacttttacaccaacctaatagaacataaagacaaagacatggactgttgagagaacaataagagagaacaggtaagaaaattagaaactctcgggaggctgagacaggataatcgcttgaacccaggaggcagaagttgtagtgagccgagactgtgccattgcactcctgcctgggcaagcaacaagagtgaaactgcgtctcaaaaaaaaagaaaagaaaattagaaactcaatcccagggctttaatatcctttttgtaggaattccagaaagaaaacaaaaaaataatgataataacgaagaaacaaatggaggagaagttaggagacgttaaatgtaaggaaaaatttcagagtttagtgaagtgagtattttccaaaacagaattatataaatctctggatttatgagtgcccagaataatatatgaaaggccatatcattgtgaaagttcagaacaccaagaatattagaagatcctaaaagtttccaaagagaaaaaaagcaagtcattttaaggggtcaggaaccagaatgggattgcatctctaaacaatacttactggaaactagatagtagcagataaataaatgccttcaaagttcatttgggaaaattattttcaacctagaattctatacccagacaaactgtcaagatagaagaaaggtatttttttagacatgcaccctccctccccacctctgtgaagctactggatgatgaattccagcaaaatgaagaagtcagtcaataagtagaactgagcccgggcacggtggctcacacctgtaatcgcagcactttgggaggccgaggcgggcagatcacgaggtcaggagattgagaccatcctggtgtaacacagtgaaaccccgtctctactaaaaatacaaaaaaattagcagggcgtggtggcggtcccctgtagtccgagctactcgggaggctgaggcaggagaatggcgtggtgaacccgggaggcggagcttgcagtgggcggagatcgcgccactgcactcccgcctgggtgacagagcgagactacgtctcaaaaaaaaaaaaaaaaaaaaagtacaactgagaatatttgaaatgttttagtgattggaaaaaatatcactagatgtttgacagatctttgaagtatttgagggaaaatggtgataggtatatagaagactaaatgaaaacaaggcaatatctctaggataaacaaagatgtataataaaggaaacattcatagtatattattggctaagcagtgaagaatatttatatcatcctaataatgtaaacactaactattgatttatcccccaaattgtgattttattgttttggggggttatggatggtgatagtataatactgctgtcataagttaatagataatggataaatctaatgaattcagaaagagcaagatgatgttactagctaaaaatctgaaggaggctgtctctgcggaaacatacaggggaaagggattgctgttttttattaccagatttttacaagactatttttagccttttttacaagacttttagtactgcttgagttttaaccatgttatgtatattactttgattaaaaagaaaaattaatttaaaaaaatgagcatactaataccattaattttctccttctagagaaaaatgtttaacagttaggtttagacttgttaattataaaaatatagtagtcttactgtaatgagattttctagaaagcggatttactctaaggcagttcagatttggtccccagctgagaattatagcctggaaataccaacagaaaaatcagtgtcatttgaaggacagtcatctgtgcagcctgtgcatgaaatcatgggtctgaattaggcccccattcaagatgcgggggtgtggggtttgtgttttgctgaagctgtggttgcaaatctttgctttaggatgaaaggtggggctctctgttacatttgaaccttagttgctactcctacctcacagctagtgtttctttctcttcataaaataaattgatttcctggtcccttggaaaacctccagactgctttctggaatcattttcatatagcatgtttgttaatttgagctcttgactgagtcccagtgagatgtaggcaggaacacagacctgatacagaaatagtcctcttttggaaataacaatagctactgtttatcgagcaccttctgtgctttgggcactctccctacatgattcctaatcttcataataaccctgtgagataactactcttatgactacctcccatttttcagatgagaaaattgaggctctgagaggtgaagtcgttgcccatggccccacagtgagtggcagatctgagactcagcgctagcctttgtgacacataactcgtgaccagcaggtagtgctacccgattgaaaaaatgtgagacttaaagggatgcatgtgtccctatacagtggcaaaaactggtatgacagaagtgatgttttaagctatgttatcctttagttggacatacactggacccacagagctagagtacctggcaggctcttgctggacaatgtttgctgaatcagagaaagtgggctttgttggcatttgcatgtgaaatactgtgcacatacctcaagatctttgctgttccccccctaaagctactagctatgctggaaacagtgaaggggtcagccagacctggggtcaccttgtcctggggtcccaagccaggcctcctgtcaggttcatctgtctctgttccacctgcactcacacccagtcttgctgctgagagatggagcatccacatcctgaatcctgcctccttcccttgacacacttctatggtgggtgcctgcccaactttttcttaataggactaaattccaaattaaaaaaaaaattcagtctctctcctctaatcatccaagaagagtcctcttttggtaacttgttctagaactatgcctatcttaaattcagaaattgctttcaaatgaattaaattttagaaatatccattcctgttcgtcctattcccagtgaaaataagcaactcttccctcttccaaaacagtggatttcttttctttttttctttttttgaaatgtagtcttgctctgctgcccaggctggagtgcagtggtgcaatcttggcacactgcaacctccacctcccaggttcaagcgattctcctgcctcagcctctcgagtagctgggattacaggtgtgtaccaccatgcctggctaatttttgtatttttagtagagacaggatttccccatgttggccaggctggtctttaactcctgacctcaggtgatcgcccaccttagcctcccaaagtgctgggattacaggcgtgagctactgtgtctggcccccaaacagtggatttccatcttacatatgcatacagatcatctgggagcttcagatccagcccattacacatattctgattctagactagaaaccaagactccgcattttaagcaagccccacattattcaaaatagattgtccatggattatgcttttagaaacattgttcagatcccatgctttaatgttggggagtttatcctttccttctaaatattttttttttttttgagatggagtctcgctctgttgcccaggctggagtgtggtggtgcgatcactgctcactgcatcctccacctcccaggttcaagcaattctctgcctcagcctcccgagtagctgggattacagatgcccgctaccacgcccagctaatttttttgtacttttagtagagatggggtttcaccatctcaaaaaaaaaaaaaatcttaaatagctctagttccctgaattattttctcctaagacatgttttcccaacagttaatgttacttatttcatcttctgatcttactcatattatccacctttcacttaaattggaaattttctgccattttacaaagttcaagactttcctaccttcctacctcctggctgtgtgaacttggacagaatacttccccctctccctccagtcagttttcttacttgtgaaatggaattaaactatacaaaatcattaggttactgtgaggcttaagagtgcctggcacatattacatgcacattaaaaatgtatttcttcccaaactaatgcaacatagcaaacaagttagttcacagtctttaatttctttccttttccctttctttttagctaatagcttttgggtcttaggctgattagaaggaatccttcttggggtgttcttctggtaagaagattgaagctctcctttatttgcttgtaacagaatgctcttcgtatctttcaaaagcgtcaaaagctggatatggaaagtataggccaggtttgatacagaagtgtagtttggcagttttttcagtatccattgccactaattcagtattttgttagatctgttgatgtatggttttataactaaaattaaaaagatttgggtacagtttataagcattattcattttaagaggatttaagaggataagatcattttagactcaagagcagaatattagtaataataattagcttaaaaaaataaacatataccaatataaagaacagcacaaggcaagcaaatatctgggcctatattaacagacggtattcaaggatatggctagaatttccaaaatgcctaataatgtgtaattcttggcattaagccgccaatttgaatatggccctttaatatgaaatgctatataatgacagactttattatagtctgatccaaggcccctgaactttccaaaagggcaacaaaacagacagatactgtattttttcactagttggtactggtggcacccttttgagtgttatttttggcattacgtgtagaggttgacagattcaagacaacactaaacatgttagcagtcaccacacgcaggctgtccagcagaatgacagcgcttcccagatcctagaaagcatccagagtcactgcacccatcccctgggggccctgtagtcctgcatctccagatgatgggagctgcaaacttccctgatggtgccctcttggatgctcatgaggcctgatctggtaccacgactctagcagtaggtccattcaatggcagtaaaaatacatgttgtatgttgatcagaatttggcaggacacatgtggaaagttaatgacatcctggccgagaacccctgtgatatacactggttacatcctgtccaactggagtttttatgtgctgtttttggcagagccaagtgaagatcttgttacttagccattcctgaggtactgaagatacccgggtttttgtcattacaggataggctagaaagtagccagggtctcataaccaaggctttctctgaaacatataatgacaatgctagttatttgaccaaagatatccaatgctttaatccacttggaatttattcttgatgtgaagggtcagcatcatccactggtcgggagcctgatccttggagccaggcagacctgggttgagtccatctccgcctgtttccagctgtgggcaaggtgtctgacttctctgagcatctgtggggtttgtttgtttttaaacctgaagaattgggataatctgtttcctcacagaatcattacgcagatgcaatacagttaatgaaggtaacatggcacataggaagagcacaatacacgtcagctcttactcttcatggctagaagatgtggactaaacttccccctttacagttttgtgattaacaccatttatgaaagaaataaatgaaataaattccttttcctgtcatgaggggaacttacctgattttattgaattatttggtgccattgagttccttattgtttccctctgacctagatttctgggtgtgcgccagtaacacgactgtgattgttgctgctttataacattgtctgtggtcagtccaaacaagagtttaaaataattgaatgaaatggattttaaacaatggtccccccaccctcaccccgtggcactcggccaaaggaagaggaaaagttctctgttaaagaaaatgaatcagagaagaggcccagaccgtgcctccgaaaattctcattgtagggactaagtcctctcactctgaactcacacccgtctgttcgcagcctgacctcatatcctggtctggatgtgcggcctcaccggggtgtcgtgcgcacgtgtggttgtcctgtgggtgccagctctgacttcctccccagacacccactgcctcagccttaatcacaggacgcgcgttgagtagaaatgagaccagttagtattggtaactgcagaggaatatgcattttcaccagcgttctcgggtcagagggtttgcctggcaccgcgtactgggaaactcgccaaaagcggtgcaggttggagacgccccaggccgcggtggagttgcgcgcggcttctaaagtggagtggagcaggcctgcaccctccccgccggggctgggacggcgcttccaggcggagaaagacctccgcgggccgcgcgcggccttccccctgcgaggatcgccattggcccgggttggctttggaaagcggcggtggctttgggccgggctcggcctcgggaacgccaggggcccctgggtgcggacgggcgcggccaggagggggttaaggcgcaggcggcggcggggcgggggcgggcctggcgggcgccctctccgggccctttgttaacaggcgcgtcccggccaggcggagacgcggccgcggccatgggcgggcgcgggcgcgcggggcggcggtgagggcggctggcggggccgggggcgccgggggggcgcgcgggccgagccgggcctgagccgggcccgcggaccgagctgggagaggggttccggcccccgacgtgctggcgcgggaaaatgttggagatctgcctgaagctggtgggctgcaaatccaagaaggggctgtcctcgtcctccagctgttatctggaaggtaagcccgggccgcacgggttgggctgagtagccgcgcgccctcccgctgctgctgggcccttcctaggcctcgccgcccgcgcgctcccgcctgcgccctccccgggtcttgtcttttttttctttcttccctcttctcttctcttctcttcagttctcttatattctgtctctctttctttctctctgtgtctgtctcttttctcttctcttgtctctctctttttctctctctctgtctctttctctttctcgcgatggcccctaggcgccgccggcggagcgtggcccccagccccggcaccagccccggtagagccacgccggatggtgacggcggcgtccggggccccacagtgcgggctcccccgaaaaagtttgagaaagccaactcgccaggccttaacatccctgggatcccacgttgtggaatttccaccgttaattgggactgtgtgttaaaaagatcgacccgtgtttgtgaaaacatgcgatttccattaagcatcatgtacacaaggagcaccactctaccatttatggatacagaatttcaagtgatctttccatctcccccacccccatcttatctacagaccacgaagaggtcttaggaattcgctctcttttcaggggaggggagcccatttaagaaggcgtttccaaggagtcccccagagtactggggtgtcatgttcgtttccttaagtgaagctcagggccaggagggcttcacttttgcgttctttctacctactctccttctctaattacatctgttttattttatttttctttcctgttgtagtctttagttttataaatggaaaaaaagtaaattaagggttatgggtcttcactttcgtagcttctaggtgggtatgaaattgatctgatttgagactggtgctcccagaccattgccttcagcagaaaggctatctgtgcttcagagatggagtggcacttggacttctctgttgttttcaactaagaatataagagtaaaaatgtggccgggcgcggtggctcaagcctgtaatcccaacactttgggaggccgagacgggtggattatttgaggtcaggatttcgagaccagcctggccaacatggtgaaaccctatttctactaaaaatacaaaaaattagccgggcgtggtggtacacgcctgtaatcccagctactcgggaggctgaggcaggagaattgcttgaacccggcagggggaggttgcagtgagccaagatcgcgccactgcactccagcctgggcgacacagcaagactcggtctcaaaaaaaaaaaaaaaaaaaaaagagtagaaagaaatgtgaagctcactttagatcaagtaggatttctgctagaatgccatgtttttctttttaaaaaagcaggagaaataaacaggcctcatttattttctaacctatttttctttccttaacctctgactctaccctgaaggcctgcttggagtcacatatgcagatcgcactagtgatgtgggtgaaacctgtttgcccttcttgccacagtttgtgtacctcactcctcttctgtctctgggattccagggggctgaatggcccagagaaggctcatctaggtggagtgggctcacagagcctagcatttggagggtggagattgtttatttgtccctaaaagttgatgtctgagcattccaaatcatcttcaattaatacatcgcttattttttccaagttgctcaaaattctgagcacattctcatttacatctgtatcgagttagtgttaggcatcatcatctccactttgcagatgggtgcctaaggcggggatgaatggacttttgtaagtgcagagctggagcaaagtttaggtcacagctttgccaagtcattgttttgttttcctgggagtaaaccggagatttagtatggacctggctggtttaattattgttttgggaaaaaaatctaaaactcattccaacatgtcttgaaatgaattataatgttgactctaaagtctcaaaaaaaaaaaaaagttctagtacagcagactgccttgggttaaaccttcttctaggaaggtgtcactctaggaattctttcttactgagttttcttcttttcgttgttatagttaattagagaaagtaaatggaattatcattttgtagttggtagactttaacaagcctcagcgatagtcttttaaagactggaagtgctatttgtcttttgggaaaaatagttcctaacatctggatgagtaatccaggctttccactttcactgacagcctaaatcagtcaatcagtgtcgatcagtcagtcagtgtttattgacgcccactcagggtcccaggcattccctgtcagggagagaattgaatgagatcaagtttttcattgttctatcaaagaagcttccaccataaatgtggtttgatggtgcatgctacctgctactcagcctagctgtcaaagcaacactggtaaacataaagatggctagcaattattaaatgcttactatgtgccaaatactgttttattactctatgtgatctgatatagttatatttcatgatagcactatgattatttccattttatagatgaggaaactgagtcaccaaaaggttaggtaacttgtctagggtcacagagccagtgagtgggggtactggaatttgaactcatgctatctggcttgggagagcccacttttagccactggatgctctactgatgtctcttttggaattcactgtgattttcaaaatggtatctccagaaactcctccaattaatccctgaaatgtaagggtagtctctttttcttttctagaaacctgatcctggcaaaatgattagctttaacagtaggattaattttttttaaatgtatataaaaatacttgtatgtaagaaatcctaaaagggtatttagtgaaaagtaattccctctcctattcattttccccacctagaggcaatcaccctggagttttatgtgtgtccttctagaaatactgtgtgcacatataagcatttattataacatgtgaattttgctctccagctttttgtgaatatgcatgtttatagcagtatctattcaccaggaccgcatttagctttgcaatattcggtctactttgaacactgaattttctgattatttctttcccctggagacgtcaaagaaaacatgaacactagccttttgaattcagggttttcttttcattttattttcatttgttcatgtgtttgtatttacatacattgtgcctgaatattgtacatgtatgtgacagttgtgtactgtagaatcaaaaactaatgtctgtgaactgaactcttcttgaactttttgttgttgttgttattgttgcttttggagatagggtcttgctctgtcacccaggctggactgcagtggcacaatcacagctcactgcagccttgagctcctggtctcaagcaaccctcccacctcagcctcccaagtagctggggctgcaggcatatgctacctgactaattaaaattttttttttttttttgtagagacagggtctcactatttttactagtttgcccgggccaagccagtgttgaactactggcctcaagtgatcctcccaccttggcctccccaaagtgcatccctacaggcatgagccactgcactcagcctgaactttcgaaatttattttaagggcccacttttaaatgcttcttttcagcagctaactttccagcggatgcttcatgtggtgccagccatacagatacgcttttagaacttgagctttggagaagcttatgcttgctttctgctctctcctgaggtcatcagatacttcccttgttcagtaacaaagaaagtgagactctttctgttacctaataaaaggccagtctgtccatttcattttgggtgctattaacattgttgaccatttacaatgtcacaggccctggcactgagcacatcatgtgcagcctcacttaattttcacaccagtgccctgaggtttctagaaaagaggaagggccccagtttaggtggcagtacttttcaatttggaggcaggagatcccagttttcctctgacctctctgagcttccgtgtttttacctctaagacagagagaccaatctctgttcagccaccttagaggattgttttgagggtctataagatgattgagggaaagctctgaaactggtaagagttaaatgtatgtttgtgttatgttgatacgagattcctctgagatgctctttagtccaggcaggtttatggctcacacagcgttcctagggtctcattcttctgcacaggcaggcagctcccgagccagccagtctggacccaaatgccacctgtgctcttggctggtcttgcgcattcaccgaggctcactgtaccttggtgttcccatttctaaaataaggcctgtagtaatccctacctcactgagttgttgagagacttcatgtaaattgtttagcagggagcctggcacagaacaagagcctagcagaaaagtaagctgttgttactttaagcaaatatttagcagcctaaaatggtggctttaccagtttctgtaatggttgaagtgatgacagaattcagccaatcccacccatagtttttcttgctaataaagcagtttgtttctaagtgtgttttgatgcgtataattaatacttcctgtccttgatttttggctgaaaaatgtcttctcttcctcgcaccctctgttattcccgtagtgaatattttcattgtggaagagaaattcccattggctcatggttggcattttatttctcctgtccagagacaatatttccacagcctcaaacgtgaaaactgaaaatctggtgccacttaccaccttgtaaaatcaagtcattgtaattgtgccagtataatcattgatctgaaataaaagcagaaaataaatcaatgggtagctttcttaaatacataagaactaaagatcaaatgggatattggaagactttaacttttcctccataatggtggatcttaattaaacacacagaagaacaatttataaaataaattcataggtttgtttgttcttttttagtgtcaatttttaaaactatctcttttttaattaaaaaaaatagagatgggtctcactatgtcgcccaggctggtctcaaactcctgggctcaagcaatcctcccacctcagcctcccaaagtgctgggattacaggcatgagccactgcacccagcctaaaactgtctcaaaagtagacagcataatgaactcccatgtacttatgatgtggctttaacaattatcagcttatagtcagtcttgttttcttacataataaagttacagtttcaaagccattaggaagaatagcttgctaattataattacttagttttgatagtgtaactttgtcctcagatgggtagaatcgttactctggaacaggggtgtccaatcttggcttccctgggccacattgggagaaaaattgtcttgggccacacgtaaaacatactaacgatagctgatgagctaaaccaacaaaacaaatcccacaaaaatctcatttctttttttttttgagacaagagtctcactctgtcgcccagactggagtgcagttgcacgatctcagctcactgcaagctccgcctcctgggttcacgccattctcctgcctcagcctccctagtagagggtactacaggcgcccgggggtttcaccatgttagccaggatggtctccatctcctgacctcgtgatccgcccacctcggcctcccaaagccctgggattacaggcgtgagccactgcaccgggccaaaaatcttataatgtttttaagaaagtttgcaaatttgttaggccacattcaaagccgtcctgggccatatgcagcccgtgggccatgggttgaacaagcttgctctagaaattggttttcaggccgggcgcggtggctgacgcctgtaatcccagcactttgggaggccgaggcaggtggtcacctgaggtcaggagttcgagaccagcctggccaacatgctgaaaccctgtctctactaaaaatataaaaaattagccaggcgtagtggggagtgcctgtaatcccagctactcaggaggctaaggcaggagaattacttgaacctgggaggcagaggttgcagtgagccgcgatctcaccattgtactccagcctgggcaacgagcaaaaactccagctcaaaaaaaaaagttggttttcaaatccttctttctttaccatgttacaccataaatatttttgttatattgcgtgtgttgagtactggtgatagggaagacagagagaaataggtgggaaggagatagagagagagagagggagggaggaaggggagacataagggggaaatctatagagacagagactgagagacaaatacaaaaaggttgagacaggaaagggaaaaaaaaacaagctgggagggaaggaagactgagagaagggagacaaagaggaataggatggccagtggggctggggtgggtgggtacagagagagaatgagtgagagcaagagaagcgcaggagacagatgatggacaggcagctgatgtatggatgggtagctggagagagaggccatcagtaacttcacatctctctgtttccatttcctgccctcaaatgccttcataatagagtctacgtaataaggttatagggattcagtgcagatgaagtgctggcacttgatacgggatcagtaagtattagctattattctatcacattaagttgcataaactttaacctcattactcttaaattctctatagaaacctagtctttatctgtcttacaagccctcaaatttagctaatagcgttgttcattgaataccttaaaattgtatttaaagacaggccgtgaatacaattaggcattgctttttgaagccaaaataccatgagggtggggagggtcatgttcatttacccagatcagcaataaaaatactaatggctaacaaggctttctggggaaattgcctgtcattgggtagcccagtgcctctggtgtcagctgaccccggagtccatgaagacatgttaaaagaagaggaaatgtgaatgctttcaaaccagccatggctggcagcagaaggggaggcctttcagtctgttgcaaatggcctgtgacaataaaaatgcctttgtgggtattagcaggctgactgtggacagtctggatctgcggccactgcagggattcctggaacctgttgggaaggtgtccggcgagctcactgtggtgtctgttaggaatctggagcaaatcctatttcttttgaaagcacagagaactgtgtttttacattatacctttaggattttggccatggtttatatttcagtcaaaacaaatcattatgttccctaggcttttatataggttttcctggtcaggttgcatttgtttttcaactttactatctgtcattattgctgctcttattacaggttaacagattattaaactgcacttttcagtaccttgtagctaaagacagacaagtgcagggtgttccacatctgagttcacccagcagtgctgtgttgttgcgttgcactgagcaggcacagaaggctctgagatatgagagacttggtctctaccccagaggagtttacattgttgtggtggcagaagagaaggcgtggcataagagaagacgcggttgttctgtagtgagcatcccagtgtcaggtgccacagttggcatccatgcagaaattctctgcatgcaggattcattgagccctcccgacagcccaactaggttgatgccatgccgttgttgccctgttgtgcagttgagaaactgaggctcagaaacaaatgtcttcaagacatgctggtgctgaggtttgaacaaggcctgtccacccagagcccatgctttttgtactgctggggacatgtgaacagattgcttactgggtgatagatgcagggtggtgatagagacagacaccaggtacccaaatgggttaaaggagaagcatcctgttgtgggcgaggtgatggggaggaggaaggaccggttagagaaggtttatgggagatggggaggccaggaagagcagaagaggctggggaacgaactctagggagagtaaatggcacttgtcacagtgcagtcaggagaggcaagcaacaggaggcctgggggatctgaaaggagtttggagaggctggaatggaaagcaggagtagagggccagatgctcccagtctcaaccctgaagagcctggcatgcctgcttcaggagctcagacttttactatagtggtggaaggaataacaaccccagccattttttgagggcctgtgcatgcctaggccctcaaaaacatgtcccatgttagctgcaaactgccagctaccctgcaaagcacatcatgatcccagcattgcccccgatgacactgccagtaagtggtagctgaccattgggagacagggccacctcccaagcccatgctctcttctgcctctcggctggcagccatctctaagggatttgaagcaagagagtgacctggtcaggtctgcatttgagaaagatggccctgatagtagggagtggaggtggaatggccaaagggggacccagccaagggcgtggtagagcatggaaaggacagaagtgatgagagattgaggaggaaaagtgccaagatgcagggtgggaactgacagaggatgacttccagcctcagtcctgatatgggcgtcaatggcaggtgttcagaatggccttgaagatagtggcatctctatttatgagtgtctttgtactccatttccagtaattggagactttttcaccgtagattcttggaaggtgacacaattttttttttttcctttttggttgagggagggggacagggactgtgtatcttcagaaaggttaatatttgaggccaaggcaggcagatcacttgaggtcaggagttcaagaccagcctggccaacatggtgaaaccccgtctttactaaagatataaaaattagctgggcatggtggtaggcgcctgtaatcctagctactcaggaggttgaggcaggagactcacttgaacccgggaggcggaggttgaagtgagccaagatcgcgccaccgcactccagcctgaatgacaagagtgaaactcggtttccccaccaaacaaaaaaagaaatacctagtttctaccagagacagtcacaggcactgtacttctactctggtttgttacctgtgttcttaaaaaaattaaatgctacattttagtaagaggttagtgaaataaaattttaatttttcccatcagaggacatggagcccttgaattctatcccagactcccagggtcttccaggttaacaagtcctgcactaaggaattggctcagtaaaacctcagcattctcacaggaagagcctaaaaaggagactgggataaattagtgagaggtccaaattatgcaattttcttttaaaataaatgcagttttattactttccacttgtagccattataggcagtagattaaatgagtttctagagaaacctcctttaaaaataaagttatttaattagtccaaggtttaaatatttcccctggaatcttttacatgacaatgtcttagccagacaatttttaagaaacaaaattctccatcctaactcctatccccatcaacagtccaaatcttaacctttctttttttttttttagacagagtcgagctctgttgcccaggctggagcgtggtgatgcaatcttggctcactgcaacctccaccttccgggttcaagcgaaacccctgcctcagcctcccgagtagctgggactgcagatgtgcaccaccacgcccagctaattgttgtatttttagtagagacgtggtttagtagagacgacctcccaaagtgctgggattacaggagtgagccaccacacctggccagaaaccaggtgtttgatatcaggtgacggttgtgatcattgttcgcaccactactttgaaatgacatagttgccactggaccttgttatttaatgtgcgaataaagagacagttatttaaggcattaataagagctatattacaagtttttaaaagtcttttgaggactgtttcaaaaagtcttttgaggactgttctcctttgcaatcctctgtaaatgcaccattgcattccaacccgggcaacaagagcaaaactctatctaaaaaaaaaaaaattcatccacaggacagcgctggccttccgttagacttttgctgttgagtctgtaagttttcagcagctgtgtttctccaaggagcggggctactgctggttctttacgtctttcccccactgccctgcccctccctgcaccctagcagctgacacagtgttttgggatttgaagataacacaaaggctgtgttcagttaaacgtatgtctgtgtgtgtgtgtgtgtgtgtgtgtgtgcttgtgtgtgtgtgtgttttaataattttaacttctctgggtgaaggtgtaaattacaaaataaaggaccatgtagaaatagataaaatgactttcatcaagctcaaaatgtgggaaataatacttttcctctaagctcatattttgaaaagttgtttgagactgttataaaataacttgagaatagtctgagcatgatctcatccgctggaacggagtatgaaataaaacacgaagcctctttttagaaggatctgttttatagatttttaaattacagagattccttgaactggaggataatagcgaaggacccacaaaggaaatatgaataaagcagcacaagtttaaataattgaatgtgagcaaaattaaagggaacgtttgtcacgtctgacatgctccatcctcctgtcccccccacactgaaccgtctccaagaaccttccggagagcccacagtgtgaacagtaatgaatgctccatagctggccgccttgcactctagtgggaactatgatgttgggcacaagtgccagcaggaaggtgggaagcttcccggggatgtttttcctggaggtcaagtccccccttgggctgtgaagtagccggtactggggttcatgggcatttcccttccctgactgttcgccagcgtctggcacagcaccagcagcccctggaagtctaggccagatatgccatgtccgagaatcttttgtaaacatttttcatcagtgactcacagctttgagaaaggattatttttatataaaacgatctttcaattttactttaaagacccaaaccattttcttagaatactgtctaaacaagttaatcatgcacagatccagtgaattctgtggcctggttcttataaaatttccaaataattttatactgtcatagacagagccagagctttttagaggtttgaggcattttttagatgtattactgttctcggtgctcaactagctaattagtgattttttctgagtttagttggtgagtggaaacctttttgttaacattatgacaaaataacaatatggttttaagtggagtgagaggcacttttgaagatccagatcttagatccagatcttaaatctgtttaaagtatgactcagaaaggaggctgcagaaaatgttcactaaaaaaatttaagaataatagcagatgctaaaatttatttcccaagacaatagccaaaaagatctgctggaagaacagaagaagggaactagttggggcatcttttttttttgaatgaagccttcagccttctttaggggaatcttgcttcctgacagagggaccggtggaaagtttgtgtcttaagcaagaaagatttaagtacattctgcaactttggccttgtaagctgtgatcatttttaaggttgacgagcatagttcactatgaaatgaagcaagtaacttggcatttatacattgtgagtcaattttgacatcagcctggattgggaattgactggaaggttttggtgttggactgtggctacacttcagtgtctcggtccagaggcatgcatgagcaatacttccctttgggctttagccattaatttgtggaatagagcaagaactggagaggaaagtcgagagactgccttggatcgcctgacgtcctgttgaatcaaaaagcagtgggaggccctttccttcctaacaaaggcctcatcctcttgcataacattcccagcatctgtcgacatgttcgggaccatcccactttaacccacacttcaagtggatggccacctctgggcggggatctgcattctgcttattccaggtgttttccaggccacttccccgattatgtaactttgatcaaatccagatgcggcagaatgtttgatagaagaggtcaaatggcatttgagaagaaaagcatttctgtattcatgactttggtttaatttcctgtgtgggcctggtctgccaaagttgtatgctcatggccacgaggttgacgcaccagagggaggcactcaagtgccttttcaggacagcctgaaggaagcctccctccccagcatgctttttcatgttaaattatcaattatgtaagtttagggccaggcgcggtggctcctgcctgtaatcccagcactttgggaggctgaggtgagtagatcacttgagaccaggagttcaagaccagcctggccaacatggcaaaaccccgtctctactgaaaatgaaaaaaaaaaaaaaaaaaaaaacttagccaggcgcagtggctcacatctgtaatcccagctactcaggaggctgaggcaggagaatcacgtgaacctgggagctggaggttgcagtgagcctagatcgcaccactgcacttcagcctgggcgatggagtgagactccaactcaaaaaaaaaaaaaaaaaaatttcaattggcttctattaaagcttttttatgtttgtcattgttttctagtaataacaacaatccacattttttgtgagaaatataccataatatagagaagtataaagaaaatgtaaggccagacacggtggctcacgccgataatcccagcactttgggaggctgaggcaggcttatcacctgaggtcaggagttcgaaaccagcctggccaacatggtgaaaccccatctctactaaaaatacaaaaaaagtagccgagtgtggtggcgggcacctgtaatcccagctactcaggaggctgaggcaggagaattgcttgaacccggaaggtgaaggttgcagtgagcagagatcacgccattgcactccagcctgagtgtcaagaacgagactccgtctcgagaaaaaaaaaaaagaaaagtaaatttaaagcacttaaaatcccaccaccctgagttaactactgttcacagtttggtgaaattcctcctcgtcttctattttttcatagttgggaccatgcctatatactggaatgtaatataaacacttaatatattattgcgagtatattctcaaacttaaatattttttccaaaaatattttgagtggcttttaaaatatatcctattttatgcatgcagcataaactaacttatcctgtgttgatagatattttgtacttgcccttttctgtgctgttgtttaaaattagtgtatagaaataattgtgttgatcacttaggataaattcctagaggtaaatcagatattaaattctttatagacttctggttcatattccagttgccctcaatttatacacctactactagcattgtatgagagtgcccgtttctctgaaatcttacccacactggctgtcagcgtcaaaaagatgtatctgcagatttggcaaggaatttgcatttcagtgattattatcaagcgttcacacactttccatgtttaatggtaattttttttgtttttttttgagacgatgtctcactctgttgcccaggcagagtgcagtgccgcgaccttggctcactgcaacctctgcctcccaggttcaggtgattctcctgcctcaactccttagcagcttggattacaggcatgcgccaccatgcccggctaatttgtgtatttttagtagagacggggtttcaccatattggccaggttagtctcaaactcctgacctcaagtgattgcccgccttggcctcccgaagtggtgggattacaggtgtgagccaccgcacctggcctttaatgataatgtaaattttttgtgaattgtttattcgtggctttgccccattttttccatagtggagggatttttctttttcttgttggtatgtaaagtccttgtgtgtcaagaatgctctgcctcacagtttttctaatataatgacagtggaagctcgtaactggcttccacttgactgacttgctaaattgaccggcactcttcacttccttataaaacatgcctccatagtccctgtgccccatggcacatgggatggggtagccacactaccactgtctgctgctgcatatgttcctgtccacaagagccagtcatgtttgtttccaagcctggttctttcagatatagctgttgttgtaattacttggttgatatgaaaccaatgaaatgcaagtgtgaaaagagaattgtttctaggaaaattaagatgaatgctttagaaagactcagtaaaggaagataaatttaacaaattactacagaattaggtgtaagacaacagtaaatgattggaatgaattacagaaatctagaaagctttgacagtgggaatgcgtagtgaatggctctaagttctccctccatctgtaggaaattgaagctggaagtgagatgatatattcattatagggaggacttacagaagaaaacatcaagctctaatcacatgtccacatttcgttttgtttacttattttttgaaatggagtctcactctgttgcccaggctggagtgcagtggcatgatctcagcttactacaacctctgcctcctgtgttcaagcgattctcgtgcctcagcatcctgagtagttggggctacaggtgtgcaccaccacgcccaactaatttttatatttttagtagagacggggtttcgctatgttggccagcatggtcttaaactcctgacctcaggtgatctgcctgcctcggcctcccaaagtgctgggataacaggcatgagccaccgcacccagccccacatacctacatttcaaaggacagtctttggccctacagtcaagactaccaaaccaatgtacactaaatgggggtggggatcacgttgttgttttttgtttgtttttgtttgtttgtttgtttgtttgtttttttgagagagtctcgctctgtcacccaggctggagtatagtggcgtgatctcggctccctgcaagctccgcctcccgggttcacgccattctcctgcctcagcctcccgagtagctgggactacaggtgcccgccaccacgcccagctaatttttttgtatttttagtagagacggggcttcaccgtgttagtcaggatggtctcgatctcctgacctcggggatcacatattttaataaaattgataatccctaatagtgatggcgctaggtgtacttttagagccaatgtaaatagtcgagaaagggggccaaacatatgactaagcttcttctacactctaggagatgtcagtattgcaagatcctgttccttgaaattatctttgccccccgccattcagaaaaattaccaaatattgtaataatgtaatttaggacttaccctttcagagaaacagttcctgaaggttgacttcagttagtagtacagaagcgagacttgaagctcttcatggtttatgttctgttggtttatcccaaagagatgttttagagcacattcatttctgaaagttctcggtcatgtttccggaagtttgatcaggtgggttctttttctttttttaaaagataattttttttttaaagataattcagaatcagtcccacccctgagatggtattattacccaggaaagaatgcgtgaggatcctctaaatccatagagaaggaaaactaaaacaattttgttaccatttgtttggctcaagcatctggtagatccttcagttcttttcaaattagaattttcctctctttttcttttttttttttttttttgagatggagtcttactccatttcccaggctggagtacagtggcacaatctcggctcactgcagcctcacctcccgggttcaggcaattctccggcctcagtctcctgagtagctgggattacaggtacccgccactaattttcatatttttgcctggctaatttttgtgtttttagtagagatggggttttgccatgttggccaggctggtctcgaactcctgacctcaggtgatctgcccacctcagcctcccaaaatgctgggattacaggggtgagcctccacgccgggcctctctttttaagataataaaaattactaaacatcataatgacatgatttgggattactctttcagagaaacagttcctaaaggtttacttcagttagtgatttttatttttattatttatttattttttgagatggagtctcactctgtctgccaggctagagtgcagagacgagatctcagctcactgcaacctccgcctcccagactcaagcgattctcctacctcagcctcctgagtagctgggactagtagctggaactacaggcgcccgccaccatgcccggctagttttttctattttagtagtgacggggtttcaccgtgttgcccaggttggttttgaactcctgagctcaggctcaggcaatctgcctgcctcagcctcccaatgttctagggttacaggcatgagctactgtgcctggcccagttagtgatttttaaattgtagttccttaaatgagtattttggatttcactccacaatgttcttcaactgtaagatctacttgaggttatttgatttgctggtttgcaagaactcgtctacacgttgtctttatcacaaagaaattctggagcgtttgagccctgttcaaaaaaaaaaggcaagaagaaacttcaggaacaaataacctatttgaccctgtaatgaataatattcacacattttctaatttaagagctgttgattgatttccaacttttagaatctgtttcagacaaaacatggaagtttagtaacagttttttctattctgtaataataattgccacaaggttaaaaaaaaaaatttacagaagaacatatttgagggtggtcgtgggggcaagaaagctggaaggacgggtggggtgtgttaatagccttgtcttgtgaagtaagtcctcagagacgctgtcctagttggaagaacaggcagtgaaggtgtgcgtctgttacggagaataggactccagtgatctagctggtacttagagaggtgggggtgatcaccaaaaaaacagctctgcctctgggagcggagaggactgggatagaaagtatttgtctttcattttaagcccttctgtacgatttgacttttctttttttttttttttttttttttgagatggagtctcactctgtcacccaggctggagtacagtggcacgatcttggctcactgcaacctccgcctcccaggttcaagcaattctcctgcctcagcctcccaagtagctgggactacaggcacctgccaccatgcccggctgatttttgtatttgtagtaaagacaggatttcactgtgttggtcaggttggtcttgaactcctgacctcatgatccacccccggcttttttttttgacacggagtttctcgttacccaggctggagtgcagtggcgcaatctctgctcactgagacctccacctcctgggttcaagcgattctcctgcctcagcctcctgagtagctgggactacaggtgtgcgtcaccatgcccggctaatttttgtatgtctaatggagacagggtttcaccatgttggtcaagttggtctcaaactcctgaactcaggtgatccacccaccttggcctcccaaagtgctgggattacgggcgtgagccaccatgcccggctaaagcaagaaattttcattgcatattttaagcaaaggcaaatgcatatgtggatagactgttttaatttgactaaagtcatattgaatccatgaattttagaagctcaaactattggggaacaataattaccaccttggagtgaaaatacttaatttccacaagatttagtaaaggaagagttttttaaaaaccaccttaatgataatagtatgtacagatgttaagaaatgaaataggaatgtgtaatgttggaaacacaaatatttttgcttctgagaataaaactaattttttctcccaattttctcttcctttttcttttttctgttcccccctttctcttccagaagcccttcagcggccagtagcatctgactttgagcctcagggtctgagtgaagccgctcgttggaactccaaggaaaaccttctcgctggacccagtgaaaatgaccccaaccttttcgttgcactgtatgattttgtggccagtggagataacactctaagcataactaaaggtaaaagggttgtgggcagctagtggtggttgcaggagatagaaatctgggaattgcggtttgacctaccaccctttgctcgttaaaggagcagctttgaaatctggactgcagggatatccaaaacaacaactgcatgtttctaagggagtcgactctccttagaggagttcttgtacaatagccctgggcaaaaacagaacttgccctattttttatactgaaaaggacagctggacaaaatactgaacgcaatttttcccctaagaaaaagcattatttccctaaaatgtcttatattaggaacagagcacttgaataaacataattgatttataaaaactgaggctatacacttacctatctgttcagtacaaacaggaagcttcaaatgtaaacgtgaattctcatacacttataaatgcatatctttatgtggacttgttaaaatgaaattggtatttaggaatttggagatttttagtagttacacaagaatcaatgaaaaagaacgaagctggtttccaaagctgatatgtctgatttggttcctttcttctcaggtgaaaagctccgggtcttaggctataatcacaatggggaatggtgtgaagcccaaaccaaaaatggccaaggctgggtcccaagcaactacatcacgccagtcaacagtctggagaaacactcctggtaccatgggcctgtgtcccgcaatgccgctgagtatctgctgagcagcgggatcaatggcagcttcttggtgcgtgagagtgagagcagtcctggccagaggtccatctcgctgagatacgaagggagggtgtaccattacaggatcaacactgcttctgatggcaaggtaggggacccttggcagggggcgctgatgggcccagggcaggggaaccagaggtcctgctgtcggattgataaattattgcaagaaagctcaaccaagaagatgtttaaagaatctttcaggtgggagtcattccattagccttatgaagaccctttattgaggatccgttctgtgatattacaagttcctgggactggtatgattctcttattgtcttgctagagttttgttgttagcaagttacttaaaataggaggaatatctgttgggttttggacacattttttacaataagattcttcctttaaaaaaaatattttataatgatagaaatcatccccaacgagaaaaattcaaataatagataacctttcttagagcgaaagaccactttactatcccctcccccacagacgcctggcacgtgggcttcttcctgcggatgaacacattcatggagaggtgtgtggacatacgtgcatacacgcatgcagttttcagtgaaaaccgggatcaaacccacagcttaccaaacccaaagtgtggtgttgtaagggaggtggcctatatgattttgtggtcttcatataaataatccttaagagtccataaagagaagggaggagttaacattgactgaggtattgctataatacctgcatctttgcattaaagaaagggaggcataaagagatcttgcccgatgtcaacctagtgagtcactgatggaataggcttggatcccacagtttattctactgcaccaggctgtagttgaggtacagtgttgataggtggtcccgatggtgtatgtttgtttgtttgtttgtttttgagatggagtcttgccctgtcacccaggctggagtacagtggtgcgatcttggctcactgcaacctctgcttcccatgctcaagtgatcctcccaccttagccttccgagtagttgggaccacaggcgcacaccaccatgcccagctgttttttgtttgtttatttgttttgagatggcattttcgctctcattgcccaagctggagtgcaatggtgcgttctcggcttactgcaacctccacctcccgggttcaagcatttctcctgcctcagccttccaggtagctgggattacaggcatgcaccaccacacccagctaattttgtatttttagtagagacagggtttcaccatgttggtcaggctggtctcaaactcctgacctcaggtgatccacctgcctcagcatcccaaagtgctgggattacaggcgtgagccaccacgcctggccgtttttgtatttccagtagagacagggtctcgccatgtcgcccaggctagtctcaaactattgagctcaagcaatctgccctcctcggcctcccaaaatgctgggattacaggcacgagccactgtgcccagcctatattttttaaatagtatgtaatgcatgcatatggttaaaaaaaatcaaaagaacaaaatgaattacagtaaaaagtaatcgtctcctaattcacttttcctgcccagaggcaagcactggtactagttccttctagagttacctggacacagatggatggtatatagatgtttatgtggatgtttatattcaaaaaggcacgcaaatgatacatgcacgcgaatgcatcatgcttctcccgtgtgataatacaccttcgagattgttttatggcaacaggtttagagctgcctcattcttaccagtgactgtgtaccgtggatggactgtcacttatttcagtagtcccctgctggttgacttttaggttgtttccaatctttagttattgtaaataatgctgatatgaggtggctttcaaaccttttcaaaaatctggttctgctgtaagaaaaactcattttacaccaccacccagccctcacaatataacaaaagtttcatgaagtcttacctacccttactgtatgtaacgcactctgatagtttgtatttcattctgttctatttcattttttaaaaattctggttgtaatccactaaatttatttcatagactgactagtggcccatggcctggtttgaaaatgcgttgcacgtgcttctttatgtgggtgtaagtgtgtgcagataagttgccagaactgactgaaggttatgtgcatcaccaggtcaccctctatagaaattgtacaaatttgttctcccacaaacaatccatgaaagggcttgtttccccttaacccacaccaacagtttattattagacatgtaaaaacacctttgtcactctgactggtaaagaatggcatctcattatgttgaatatccatgtggcatattttgggtcatctttatgccatttagtaaattcatctttttcctacatgttagaaatataccaagtgtatatgtgtatctaggcctgttgacctctctgttctcttccattggtctgtctatccgtatgccagtaccaaacttgtaattgctatggcttcataccatgttgtggtatctgataggctagtccccacttacctttttaactttttttttttttggctgtcttcacacattcacttgtaccatatgaacatacatatacttcctttttaatgttcttatttttcttcacatcccaaagtcttctggctgaaatcctattgcccatatctgatgctttccaccactgcagaattctttagtaccaacactgcagtgtgcgtgacggacaaaagagcctgttatccctgtgtgactagacgtgggcctgtcagcttgctttttgggttattgttcttatcccagaggtggagctgcgttcttccattctgagggacgtacttcaggacattgggccctttgaaagagccttcagaccacaagggtacctttctagtgaatcagaacaccagggtgcaccgcccatggggggtgattttctggagcagacagcttgcttcccatgtgtgctatttatccaaggcaagtcatgctgcaccgagatagtcacttgaggtttgcaccgaacaggataatggtttcttttccctagagctgtttaatcagcaaccttggaacagatgcaggcaggcatgatctagtgtgacagctcattagctaggggttgatctaaaatactgttcaaatgggcaaggaaaggcctgcgtatgggatatgtgatttgcagaatttgagattcatccaaagagggagaatctgcctaagatgcctctgtctaaaagctagtatgtgccaggtgggtttgtttcattccaggtagagcacagggagcttatgtgaccaggcagtgtccaccattgggcaacacatcacacttcccttggcgtcttgcctcctccctccccgtctggcacagactctcccatcagccgtttgggcacctggggacttctgagcccacagcgtcatccagcagaccgtctgcggaggttccttcctgtgagggccgcactcgagggggtgtattgggtgggatcgtatcactggaatgagtgaacatcgttagagggagctcccacagctatgcgtgtgaccgtgtggctcgccgctgaaaaatgctgctcacatagcagaacttcgatgcaatcctttttggatttctaaggggaaattttaagaccgataggaggaataggctggggttgaataagtttggttcttatttttaaattagctcatctttagaaaacaactgaatttagaagattcttctgtaaggccccaaaggatttctttctgcctccccgctcttggctcttatttgtgtctctcctcgtgttctgagcttttcagcagcccttgtgggtcatcagccgaggaccatcagctcggggcccagagctggggactgggagttatgagctggactcttgaaggggccaatactaaaccgagccgttgccatttcctaggagccttgacaggctcaaacatctctgggtacccggggatttgactgtcattgttctgatcctttcccaaagttgtaaccctctgttgacatagcggaattgaagattgatttttcttcaccaccttctgcctaaagttcttagttctgaatgtgtccacacctcattgacttctatgagatgcccctgtcacgttcctcgattccttctagtccttaatagagtctttccttttcttgaaagaaatttgcccagttgacatttattttcatcgtctgctgaagtgacagatccaaggccctaagcttcagcagagttgcaggaagggaccatttacacagcctcttagatgtttaaggtttacccgccctgacagtggctcagcaggcgtaggcctcctggtgaaaagccgagcacatggctaacctgctctggtggaggggctttggaccgttcttgtgtactgcgaggcttgccttcctgctggtgtgtgagcagctctcgggggaacttgcttcctggctgagcaacctgtaaacagtatgtctgaggtgggactcccgggcccaaagcagccaaaggttgcacaagtctaagctccgttaggcctgtcagtgtggctgtcaaaagaaacgctgtttcttttctttctttcctttttttttttttttttttttttttttttgagacaggctgtcacccaggctggagtacagtggcacaatctcggctcattgcaacctgcgcctcccaggttcgagcgattctcctgcatcagcctctcaagtagctgagactacaggtgcccaccagcatgcccggctaatttttgtatttttagtagagatggggtttcaccatgttggccaggctggtttcgaacgcctgacctcgtgatctgccctccttggcctcccaaagtgctgggattacaggcgtgagccactgctcctggcaaaatgctgtttctaagcgtttctttgacaagtcccatccttcaggttcatgcatgattagggagaggcagcagccctgactgagcacctgagtgttcatggaaccaggtgcatagcgtaatgacatgccattcatgacactactttcttccctgaacatgccatgaattcctgatgattacacagttccccaacaagtgctgctcaaaacctggaactaatcagaaggaagcaccagccttgactgttagtgggacacggggaagatggctgtgaaccaaatatgcggtgcctttgggggagaatggttttagtatttagtaagtgtcagtatgtaagttttatgttgaaaaatgaactaagtcacaacaaggtctataaatttaattattgaaaaggataaagttgggccattcagtgaaacctcctgtaactgaagtctctaacacagtagccaatgggggaatcaaatgagcccaagaagaaattctgcgtaaactaggacttaggggagcccttagcattccactttggagtgaaggaacccgatccgccagttggggaacgctcctttgaggcccatgtgcttcctgctccgacgggagagagggataatgagacttgctcccaggtgccctgccctggagcccagcaggccacacgggctctttgactctgtactgtgccagtgatttccaagatgggagtggtgctctgattgcaggaatgtcttcttggaatggcttttctcacttctctagagtccttggtagggagcacatcatcagctgagctaacgtgagaacaggggttggagcacttgccaccggcagtgaagtaatcggacagctgacagtcttttccagagggtcggggattgggagctgaccccaggtcccgctccgttttctttgtgtgcagcacttgtgttggtgaccagcagtgaagagagtgcgtggacgtcaccgtgtggttatgaagctaacggcagccctcagcggtgccgacttccgctccccgacacattcctgtgtgcacgttcgtgggtctgagcgtgactcatggtgtgtgtccctagagcagttcactcagaggcttctcttccgtgctctcaagaataaaagcagggccgccacatcctgataagtcttgccattcagcggtcctgtcttgcagagggataagccagtgtccccaggccacagtccttacaccttgagcaagttccccagagtgaagcaatctttctagacaagttttgcgtttctcagaattttattttagtgatattgttaccaaaagattgtaaccccaaaatgtgtgcctttggcttgcctgttttaggaattcacttgtgttatctccccaagcaaaacaaaagaaagagaaaccttcctgttgacgaatcctttttaccttcttgagagttgtcaatgggactaacttgtatatttctttgctaccttcttttaaaaacatttttcttatttactattacagacgtatagtaatggtgcctgacataacccacagccaaaggccttggccttgctgtgtgtatttcaggctttttcttcccttttctttttttttaagtaataagatattacagttatagctgaagcctgatcctgttcccttttctccctctcgtcccaagcatcaccactgtcccaaatctgctccttcttcccacatctttgcagtttgggcaagtcttctgaatgcctagtcatgattttaagtcttctttccaccttcagtgatggttggctaccctgagcaagccagtagattcagttatgtgcctggagtccagatgttttatgtggatttttcatgtggaattgtttttggtaaggaagtattcccttgccacaccaatgaaaagagaagaaaacaggtagctggcacccactgcattgttgctttctgccagcctgctccttctccttcctctccagctctgttgtgtccagatgcaaactctacatgcagggtttgaccctaggtcctcacctgctgtagctctcacacggggaccgaatgctcttgtgtcgtaaatccttccttttgcttcctcgtgttggatgtgtttagtggttttcatcttctggtcactatttcattctaggtttatcccctttaaattataaattaaatgaattcttcgcttttcctaccagcaactacccaccaagttctaccatgtgttaatttaatcaacagttatttattgagtacttattacatgttgatttcctgttctcaacattggaatgaagacagcttagggttctgctttcatgaagcttgcatgctcttaggtggagacagacagtaattaagcagataaacaggaaattatgagctagtagtgggtccattgctgagaagtaagacaggtggtaggatgacccgtgccgtgtgatgactttagattgggtggttggggaagacttcacggaccttaaaactggccttggaacgggaagcgagaactgggcacggaagatgagggagtgggagatttcaggcagagggagcagcagcaggtacagaggccctgaggccttttattgtgtctttttgcttgagcgagtaacttagagcacacgtagagaaagacagcagaagtgatcttctaaacactctgtcctgtgtggagagctccttatgtgagattttgctgtgtagtgaattaaggctcagccaaactggctcacgtgagctctttgagcttgcctgtctctgtgggctgaaggctgttccctgtttccttcagctctacgtctcctccgagagccgcttcaacaccctggccgagttggttcatcatcattcaacggtggccgacgggctcatcaccacgctccattatccagccccaaagcgcaacaagcccactgtctatggtgtgtcccccaactacgacaagtgggagatggaacgcacggacatcaccatgaagcacaagctgggcgggggccagtacggggaggtgtacgagggcgtgtggaagaaatacagcctgacggtggccgtgaagaccttgaaggtaggctgggactgccgggggtgcccagggtacgtggggcaaggcgtctgctggcattaggcgatgcatctgcctggaagtctacctcctgcctgctgtccgagggcttcattggcgccacggaattgacttttccgtcttatatcattcctgtgtctttgtaggagtggaatcattctcatagtccgagtgtgtttccacatatggtgagagctgacaagcatggaggggttttggtgtaaaaagattagtcatttggagaggttttctcattttatggcaaggttcttttaaagccgtggatttccatgctgttcgtgcggcatggagatcacttcctaccgagagttaaggaggaaaaaaagatctctgagttttgaaagaagatttaaccaaaatgcatttgactcttctgtggatttttgttggctgatttggaaggcaggtgccctgggcatccccagtgggttccaattctgcagctgcccagactcctgcaggcagaggtggaagtgtccccgctagaaaggcatccaggaaactcgcttttgaccaactcagatacagtctggtctttcttgttaactgggactttaccctctccactaatgaatagtgtttgtagtttccaggcaggtttttttcttcttttgaagttctttgaaacccttaggacgccaagggaaggaagttttcattttcagccctttgcattcttcaaaatgtgatccaggcttttccctgtggcgagggtgtcccctagtgttgacttacattatttccacttgttttaaatgaactttgattaccttgacctgtgcacagaaatcaagagaggcagcccctttttagagctgttagaaaagaactgaaacatccacctctgggaaaaatagagtttagtttgtgcatgtgtctcagaagtcaggtgcacacattgagactggtgcagccacatgcctgccttttagggactccttgactgacctgatgccttcacccaaaggcatagtgaaatgggaagtatgatttctgactggtatgaagtggctgctttagagaaaagatcacattctttagtcctagaaaccaaaggtggcttcctgatgctcttattcagcacgtgcctgtctttgaggcaggactggcactggggtgggggcatggtttggggttaccttaaggaccctggatatttctcagataggactttttcttttctttttttgagacggagtcttactctgttgcctaggctggagtgcagtggcatgatctcagctcactgcaacctccgcctccccaaattggcgattctccttcctcagcctcacgagtagctgggattacaggcacccgccaccacacccagctaatttttgtatttttagtagagatggggtttcgctgtgttggcctggctggtctcaaactcctgacctcaagtgatctgcctacctcagcctcccagagtgctgggattataggcatgagccaccacacccggccctggactttttcttaattgaataaatatttatcaagttcttcacttctatttgacggttcctgggctcaacactggattagaaaatgaatgggacagagttcttcatctgagacatagggtggtccaggtagtaggaggaagaaggattgcagcgcagcagtcctcgggacaccaccagggggtgaacgaaggagggacgggggagctgtgcaggtgccccagctccttgggttgcacagggttgaagaccagacccaagaaatggggccttgaccagctcagcaaactgagaatggcctagatttcagcacactttcaccaggatttgtcaaatgaaggaagattccaagcgcaaaataccctagatttcaaccagtaaaagcttgtctgaaaacttccaagatcgggttgtacaacttgacatttgaggaaacgctacttcagtagatggtgctgtggcattgttttctgaacaactgaaggaggagactccagagaagggtacctgctggagacctgtgtggtttgtggggtgggtttcttatatcactgaatctaaagtgggtgcctttcagaatgtgctttactaataatgtgttactctgcttttaattatacttctaataatttttcccaagagcctaattaacttacgatctcacagttggtaaagaattacaggatgtcattgcgtggatttctgtgggcagtcacccggagtggtatctaattagggaaaaggcagtatgtccctttctggaagtgtgttaactgaaaatacggtactaagcaactgctaaataaattagccctccttcctcctggccgtgcgcagaaacatccctgcagtatgttgcctatttgtcaaataagattagtgtaaatatggggcatttacctttgctatagaagctgaaattgccaggcacggtggcttacgcctgtaatcccagcactttggaaggccaaggctggtggattgcttgagcccaggagttaaagaccagcctgggcaacatggcaaaactctgcctctacaaaaaataccaaaaatcagccaggcgtggtggtgcgtgtgtattcctagctacttgggaggctgacatgggaggattacctgagcccgggaggttgaggctgcagtgagccgtaatcgtgccactgcactcctacctggggagcagagtgagaccctgtctccaaaaaaaaaaaaaaaaaaaaaagctgaaatccttgagtggattctaaatcatggcagtggctaacattcagcttcatcgtgcccttgctgtgtgcctggcagagacctctgtgcttactacatgtcgcatctcattgaatcctcacaaccttaagatccttccaggttgagcatcccggaccctaaaatcccaaatcctaaatgctcccaaatccaaaactttttgagcaccggcatgcagctcagaggaaatgcatactggaacatttcagattttggattttctaatttggagtgctcatctggtaatatagtgtggatattccccaatctgcaaagatctgagctccgaaacacttgtagccccaagcctttcagttaagggacattcaccctgtatcaacattttaatgctgagaaaatggaagagagagaggttaagtgactgacctggcatcacacagccaggagtggcagcatcaggatttgaactggggcactcagctccaaagctcagctcttcttttttaaaattgaacccagattcttatttctcaaataccataaaatatttacataagccacagttatgccttttaaaaaaaaatcaccttttccccccactctcccatttacttcctttgcagtttgtggctacgatctaccttcctcttcaaaacccttgaaaaatccttgcagccttgcccaagcgtccttccctcagccgatttttgggcctcagtttcctcccatccagcctgtttcctatcgctggcttctccaagggcagagccagagtcctcttttgccagcagggggagcaagggcctacttttaaccgcaactccatagtgaacaagtcaagcaaccttgggtcattcatataccttccaggcagaaggaagacagaagagaacaggaaaaaagcaggacactaggctgacccctgcagatgggaagctggaattacagcaaaggctcattgattgggaactgcacccttgaattttgatagtattgggcaggacatagtcttgctatctgtgttaaagggaggacgtgcttaagaaaaccaacagtcaagtacaagaagctctaattttttttgaggtgggggaacggggtctcactgtgttgcccagctggcctcaaactcctggctcaagcagtcctcccacctcagcctcctgagtagcagggatcacaggcttgtgccactgtgcccagctaagaggctgcaattttttaatgaactgtattcagagtttgtacatcagtgtcttttttttctatgaatcagttctctaagtaatagaatttggaaaagaccgctggtgatctagctgtggcatttagattgactcatgagctaactgacaaatttactacttaaacagtggaaaataatgtgcaggatatatttttttgaataggttgtcccaccctcgagttctgtgtctttcctgagtccgcatatgtgaaccttgttttaaccaggtgacagcatcccataggcacggatctctgtcttctgttgtccacatcatgtgtcttggcagttgttccttattgatatacataaggttgtcttgtttttgtatggatatattttaacatgtaccagtgttcagtgggcctttctcttatttccaatattttgctgttctaaacagcagcacagtgattcccctcatttgcatgtatgtgaaactatcctggtgggtccgcttccagaaactactggatcagggaccatgtgcatttatggccttgaccatactgccagagtaccttccaaggagtttgtgtcatcaatttgcactccccagtggtgttgagagagtgcctgtttcctccacccagcacagtgtgtttcggttttatttctcccaggaaatgggtgttagttggggagctccagaaagaagccgagaagaagggcagtcgtacccttggcagttgtacgcagtggctctctggccgcacaaggagggctcggagcctgctgttgccaggttgcacttgctcttgcaagacaggcattccttgcagtgggttctcctctggccagggagatgagttctgggggctcctctacgaggtggtctctcctgggctttcctctcgagcttcaagtcccacctctggagtgtgaatcgccttcctcagtctaactctatccctccagtggtttttttttttttgctttttgtttttgtttttgtttttttgagacagagtctcactctgtcacccaggctggagtacagtggcgtgatctcggctcaccgcaagctccacctcccgggttcaagcaattctcctgcctcagcctcccgagtagctgggactacaggtgcctgcgaccacgccggctaattttttgtatttttagtagagacagggtttcaccatgttagccaggatggtctcgatctcctgacttcatgatctgccctcctcggcctcccaaagtgctgggattacaggcgtgagccaccacacccagcagtctcttcagtgtatttagctgtgttgatcctgattcatctgatgggtgaaggaatattggaaataaggataatccctgtggtgtttcactgtgcctgtaacctctctcacctagcatttggttaaccagaaacagatgtggaaactgatctatctgtagataatggccctgctcagggagggggtccctgctgagagcgagacattgaaagcctgctacacagaaactgctggaaggccaagccatttcttttttctttttctttttttttttttttttttttcagacagagttttgcccagtagttcaggctggagtgcagtggcatgatctcagttcactgcaacggcctcccaggttcaagcaattcttctgcctcagcctcctgagtagctggcattacagactcctgccaccacgcccggctaatttttgcatttttagtagagacacggtttcaccatgtggccaggctggtctcgaactcctggcctcaagttatctgcctgtctcggccccccagagaggccaagccatttttaaaaacagtgttctttttcatgctgtagaatacctgtgcttgggggtgagcaaaaaggaggaaactgattagaaaatacctatgagggccgggtgcagtggttcatgcctgtaatcccagcactctgggaggccgaggagggcagatcacaaggtcaggagatcaagaccatcctggttgacatggtgaaaccccgtctctactaataatacagaaaattagctgggcgtggtggcaggtgcctgtagtcccagctactcgggaggctgaggcaggagaatggtgtgaacctgggaggcggagcttgcagtgagccgagatcgcgccactgcactctagcctgggcgacagagcaagactccgtctcaaaaaaaaaaagaaaatacctgtgagatgttgagtctgggagaatgtatctgtgagaagacaaacaaccctagtattcattaaagaaccagcctttgttttctacaagctatctgttcggtctactcaggaatagagataaactgccttaatagtaataaaagcaagcaccgctgagtgagtgctggcctcatgccaggaactgctcttggcactctgtgcacaagggagatactgacattctttctgttgtgcagatgagaaaacaggctcagagaaggtgagtaacttaccatggtcacacagcagcagagctaggtcagtataatccacaagtcattctcttaaccgctccgccgtaccgcccagaatgttcatctgcatctgggccagcctcgtcagtccgtgcaaagaggccagttgacccatctccctccctaacaagcacagaagagaccaggctgaaaattcatagctttcactcaaagtgtttccttcacctcattcatctgagttagctttattttactatataaagagaattttcttcagcaaaatgataggaatttttttaatgaaagtaaaggaatgtcacagaattgcgtcagggatatttccagtttaacacaactacaaacgtaggctgttttgttgttgttgttttggttttctattttgagatgaagtctcactctgtcgcccaggctgaagtgcagtggtgcgatcttggctcactgcaacctcctgctcccgaattcaagtgattctcctgcctcagcctcctgagtagctggaactacaggcatgcgctaccacgcctggctaatttttgtatttttagtagagatggggtttcaccatgttgaccaggttgttccggaactcaggtgatccaccttggcctcccaaagtgttgggattacaggcatgagccaccacactcggccagctgttgttaatagttaaaattataaattggacaaggtctgattccagcagggggagacaaattcacattgatttttctataagaaaaggaattatttgtactttcctcccttgtgtgtttgtgtgtatgtaagagagacagatgagaagagggctgcctttgagagccatgttccttttgcatgtacatacctctcaagattattacatgggtcttttagaagagggtcagtagctataaaagcaaatgatatttatgaaatgatttcattgtatgtggtttattatgtagtcttcaaaacagaaaaaccccacttgcttcgaaagcttcctttgagagctactttttaaccatattgttgatcaagcaagattcttaaagccccagtcctatacgtgagcagcattgaatccccggatactggcaggcgttcactgtccagcctttgacattagcatgtcaccctggtaaatcagagcactccatgccaaaaaacagcatggtctgctgagcacattaaggagcagagagggctcagaagaattaaacggccaatggggtggtgacagaggtgagctctttccccctcggacagcttggcatggtgactaccaatgaggtttaattgacattaagagcagctcaccatttttaaagagcgataaattgtttccaagtttcagcctcacggagccctgagctaagagataatgggctgacacatagcctcattggtcacgcttcacttgtaaacaggattggccaaagcaagaaggctgtaagtaaaggttggcccgtcctctggaagcctcccccacagcagggtggggaactggggcagccatagcaagcaggaccatcaggacacggtgtctcccaaacgggccggaacatacaaggttctacgtttaatagaaagttgatcaagccttcctctttggggagcctaatttttaagccattcactctctgttcccctgcagtcttttctctccaaactctgttgaaacttggaggcatctcgcttcctcctttggcctttgtagccaggttttcgcagcaaacagaccatatcatttaacacccacctgcttcttgttctgatagtcagttcagtagacagtagcattttttaagtcaaaaagaggcttagtgatgtaggccaaggtcaaggctctgtgtcatggggctctccccagggctcagtgccacggcacttcagacttgaccccagactgaaaagatgagaggacctgtagaagtcacggcctgtctgtcccgggcccatgctcctatctttttctcccccttggcatttagataccatggacttgttaaaatgtgacatgtactgatgatccttatgaatttgttggtaggggagctgctggtgaggattattttagactgtgagtaattgacctgacagacagtgatgactgcttcattaagagcccacgaccacgtgccagaatagttcagcatcctctgttgctactgtactttgagacatcgttcttctttgtgatgcaatacctctttcttgtcatgagggtctcttcccttaaatcaggtacatttcagattcttcaggtgatgttttttaggctgagtgtgttagcaccccttggaaaccaggttccctggggaaagtgtgtcacgtttgtggtgtttgcccgtatagctctcccacacccccacgagctccaagaggtggggaagcacatgtggcctgcctagcaggcaccagaagcaggttgtcggcacatgcaagccagctttgccctgttgcctgggggagaattgaaaagtttggccccaaaggggaaaattctttctgccatcaagttgctggtcagctgtcatggaacctgtctgcagcaatgtggctgtcacaaaacgcagcccaggacgagtatgcgctgaagctccattttgcattaactagtcaagtacttacccactgaaaagcacttcctgaaataatttcaccttcgtttttttccttctgcaggaggacaccatggaggtggaagagttcttgaaagaagctgcagtcatgaaagagatcaaacaccctaacctggtgcagctccttggtgagtaagcccggggctctgaagagagggtctcgcgccgcacccccagggtgacacaggcgctggggaagacgcacgggcggctcactgcacaaaacctcgttggaatatttgtgctctgccgacgttcagccgcgggtaaaatgaggcctgtatgggatgggtgtgtgcgtgtgtgcacatatgcacatgtatgtatgagagggagaatgtgattattttaagtggatacctaaaagcagtcaaatgcaaatctgaaattagtttctgaaacttgggcattttccagagttttctcactgaagtgattctgtaagtagacacataaccatcagacctaaccattcaggggtaaactgacggtggtgaaggtcatttgaggtggggccaggtctgcgtctgaattctgtggcagcctctccctgcgtaaattcaagttcactggcttgagaagaagaaaagagcctggccatgtccctcccacacgagcacagtctcaggatgcaggtgcttgggaccatgttggaagttgggcccaggactgaggagcagagtcagaatccttcagaaggctttttctttagacagttgtttgttcagttgggagcggagccacgtgttgaagtcctcgttgtcttgttggcaggggtctgcacccgggagcccccgttctatatcatcactgagttcatgacctacgggaacctcctggactacctgagggagtgcaaccggcaggaggtgaacgccgtggtgctgctgtacatggccactcagatctcgtcagccatggagtacctggagaagaaaaacttcatccacaggtaggggcctggccaggcagcctgcgccatggagtcacagggcgtggagccgggcagccttttacaaaaagccccagcctaggaggtctcagggcgcagcttctaacctcagtgctggcaacacattggaccttggaacaaaggcaaacactaggctcctggcaaagccagctttgggcatgcatccagggctaaattcagccaggcctagactctggaccagtggagcagctaatccccggagtaaggaatatttcatttttgaaccattttgggctaagtggaatattaaatgaagttcataaaaggcgtccttcctaataatcacagtcccctctgaaagagagtactcattgttcctccggggccagcgcccagcagtaatggcctcttcctgggagccgctggcattgcttttacgcaaactcatgggaacaaccagtacatggcttttgttttttagtgtgtgtgtctttttttcctgctttctctttattatcttttcattctccacttaacttgctgtcctctgattcagggatgtttccacaattgtcagaattgtgtatgtggaggtctaaattaagtgtctttgctgttttaaaccctgaagtgttttgaccttcaaatgtgccacaattatcttggtcttcaaattctttgctggtggaaatggcttcccagcaaagcgacggcctgtgcaggacagagcctgatgggctttgctggcgtcttttatacgagatgttctccacaccaccactgtgacctttcctacccaattagctcaagtatgaaacctctacatgagatttcatagcaaggaataagggtagcatgtgtgaaatgctggcggctccttgtaagacagattttctatgctccatgagagcctgatccagatactcctggctttcaggaaagtgaatcctctgatgctgcaaattgagattgcttgacttctggtttgcctggcacggccgggtccgttccttcttcattcaagcgaacttaaaatgctttatcaaaatcctcttaggcacaactcttctgtatttaatttcactcttgttgctgacgatcaggctatctcacgcagccatcacctcaagctgctgccccctctcattccgctcttcccgtttgccttgtgatttcatggttaatgttcatgaaccaaagattagactcctacctccctgggagaatcaggaagtgagaggaagcagattatacaggagagagttttttaggatacatttgggtacacctcaggaagaaagagggaagtaggaaacacagtttgggtaaagaatgccatgggctttgttttattttgtcccatcaagtctgaataggacaagtggagatgcactctgatagaagtttcttgcaatcaaggactgggctcagtgtttgtctccgtgcctggcatagagtagcaataactgcacttactattctcgacacttcaatcaaagcacttagcatattaattaattacactcacagcaaccctaagaggtaggtgccattattatcgtcttcattttacggatgaggtaactgagtcccagggtaattaacttgctccaggtcatgaggccagggagcccgctcccagcaccagcctctccccatgttgggatctcagggtgtgtttgctgagaggctggcactgtgttaattgccgtgggcattaatacaaacttccagggcattggactcaatctttccattgtcagcattgcacctttgctcagcagtggtggatttgtgaagtggaaggttggccaggagctctcatgggtgaacattttcctttcttagagatcttgctgcccgaaactgcctggtaggggagaaccacttggtgaaggtagctgattttggcctgagcaggttgatgacaggggacacctacacagcccatgctggagccaagttccccatcaaatggactgcacccgagagcctggcctacaacaagttctccatcaagtccgacgtctggggtaagggctgctgctgcactgaagtggtccttcctgactacaggagggtttttttctgcctctttcttgctcttccctttcttttcttcctttctttttgtttttttgagacggagtctcactctgtcacccaggctggagtgcagtggtgcaatcttggctcattgcagcctctccctcccgggttcaagcgattctcctgtctcagcatcttgagtagctgggattataggcacccgccaccacacccagctaatttttggtatttttagtagagatggggtttcaccatgttggccaggctggtctagaactcctgacctcaggtgatctgcctgccttggcctcccaaagtgctgggattacaggtgtgagccactgtgcacagccacccttttttttttttttttaactgtgtatttggcctgaggtccaaatatggtgcacagtgtatctgctgatctgttaagtctcctctataagccccctctccatgtctttatttcccttgctgtttattgaagaaaccatccttagagtttcgtacgttctgggttttgctcattgtctcccatggtgtgatttaatatgttcctctgacttcagtattcctagtaatgggtggctggatctggaacggcctcatcacattcaggtttgactgtttctcttttagtaagagtggatcaggggagatggtgtgcccttccatcagtagatacaaaatgcttcatttatttccttccttcctttcctcccctctccctcccctcctctcttctccttctccttccgacggagtttcgctcttgttgcccaggctggagtgcagtggcacgatcttggctcactgcaacctctgccttctggtttcaagcgattctcctgcctcagcctcctgagtagctgggattataggcgcatgccaccacccccggctaatttttgtatttttagtagagacggggttttaccatgttggccaggatggtctccaactcctgacttcgtgatccacccacctcggcctcccaaagtgctgggattacaggcgtgagccaccacgcctggccccaaaatgcttgatttgctatcgtttttttgtgggggtttttttttgagtaatttttggcagttactgatatacagtgcctagatccaatagtttgctaggtattgccaggtaggaattctctaattctgtcattcctgttaagttactagtggaaacttgtatgaggagaaacagttcctcatctgtgtggttactcagtggtacagttcatgtaggaagagcagggtcaattcttgcttctttgtttttatttaccagtttttaaaataacaaattactttttcttttttttttttggagccagagtcttgctttttctggggtacaaagtacaggctggagttcagtagcatgatctcggctcactgcaacctccgcctaccagattcaagcaattcttctgcctcagcctcccaagtagctgggattacaggtgcctgccaccacgcctggctaaatttttttgtatttttagtaaagatggggtttcaccatgttgcccaggctggccttgaacttctgagctcaggcagtccacctgccttggcctcccaaagtgctgggattacaggcgtgagccaccatgccctgccacaagttggtttctttttttttttttttttttttttgagacagtctcactctgtcgcccaggctggagtgcagtggcatgatctcagctcactgcaagctccgccttccgggttcacgtcattctcctgcctcagcctcccgagtagctgagactataggcgcccgccgccacactcggccaattttttttctatttttgtagagacggggtttcactgcgttagccaggatggtctcgatctccggacttcgtgatccgcccaccttggcctcccaaagtgcacaagttagtttcttaatacccttcagtggtggccaattaggtttttgctgtcattggtggtattatgaactctcagatttatatatatctgatgtgtttcagtccactgcggttattttccctgttgatattcagattgtctcgtctttggccagtgggaacttcacattagctcctagtcattttgacattaactttgtagttttccatgacgtccgcgccctcaaatgacaagctattgcaggttcattctgtgccccaggcctgaatcacccatttctctaaggaatcttatcctttaatgggaaatggaattttaaggcaataatctcagatttcaaaactttcaaagatttcataagatttttatgaaatgtttagagttagaaggggctttggagatagtcttgtgcacccagaaagcagtggtggccggttaggcacagagctggttggtcacagagctaagagttaacatggccagctgacttccggcgccaggttccttctaccacatatcccagcaagatggtcacattacctaaaagaccccacagggtctgaaactcatcatctgccctcctctagcatgtttgtggggtaagtttactgagtcttgttctgtcctggtctcctttttttttttttatttttgagacggggtcttgctctgtcgcccaggctggcgtgcagtggagcaatatcagctcactacaacctccgtctcctgggttcaagcaattctcctgcctcagcctccaaagtagccaggactactggcgtacaccaccacacctggctaaattttttttttttttttgagatggagtctcgctctgtcacccagcctggagtgcagtggcgcgatcttgatcttggctcactgcaagctccacctcctgggttcacaccattctcctgcctcagcctcccgagtagctgggactataggcatctaccaccacgcccggctaatttttttgtatttttagtagagacagggtttcaccatgttagccaggatggtctcaatctcctgacctcgtgatccgcccgcctcggcctcccaaagtgctgggattacaggtgtgagccaccgtgcccggcccctaatttttgtatttttagtagagatggggtttcgccatgttggccagggtggtcttgaattcctgacctcaaataatcctcccacttcagcctcccaaagtgctgggattacaggcgtgagccaccgcacccagccttgtcctggtcttctgatgataaagagcctggtaaaatgtcagagcctgggctgctgctggggccatcccttctgaggtctgctgcaaaggtaactgattttaaatgtagtgtagtgaaatgctacacatcttgaacagcctttctctttcggttttctttcagcatttggagtattgctttgggaaattgctacctatggcatgtccccttacccgggaattgacctgtcccaggtgtatgagctgctagagaaggactaccgcatggagcgcccagaaggctgcccagagaaggtctatgaactcatgcgagcatgtaagccttcctcagcctgttctcacgagtatatgtgggcattccaggaaattcaactgtgcaggagtgtgtacacaaagttgaaagtttttccatgagctctctccattccagttcttcagatgcagctaatgtagccatttgctacctattgacctttatttacagataaatagtatgtgcgtgacttgtcttttaaagcaaaaatggtattgatagataccaaacctgggtgtattcctaaatacagattcctgggccctgctttcacagacattctgctatagtagctaagctcatgaggtgattttttttttttttttttttgagacggagtttcgctcttgtcgcccaggctggagtacaatggcgcaatgttggctcacttcaacctccacctccctggttcaagcgattctcctgcctcagcctcccaagtagctgggattacaggcatgcaccaccacgcccggctaattttgtatttttagtagagatggggtttctccatgttagtcaggctggtctccaactcccaacctcaggtgatctgcctgcctcggcctcccaaagtgctgcgattacaggcgtgagccaccacgcccagctgcgaggtgatttttatctggtcgttttatactgattacatatgtgttatctgtactatgcacacacaggatgttttcatatatcttataaggtatttatatggccatttcttacactgttttcccacacatgtctttccacgtccatatattcagatctctccctctccctacctcttatttatgtatagctgcccagtactccatttcactcattcatccggtcctcttttgatgtgcatttggttgttttacacatttgtttggtttttgcccttataaacaaagcagaaacaaatattcatgtacacgaatctctgggcactttggctggtatttctaaaagttgaactgttggttccaagaactgtgtgggttttaaattttgatacattttaccaaactgttaaaaaaggttgtgccattgtatgctccagtcagacgcatatgggagtgactgttcctggtccccagtactaggctttgtcagtctgtttagtcctcatgttagtctcattttcatgagaatttctttacttcagactttgataaccgtgaagaaagaacaagatagaaggtgagctgtttggcttagtaattttctacacctactagagcgggactgggaaaaatatatttgtaaatgcagttcttgctgtcactgtctctctggggttttacaatccatattcctgccagcatctaacgtcttttcaaattcttaatgtctataacaggacatgatgacattcatcgttttgacttgttgcagcaaaagatggttagcaggattggaatgttgctttcattctagacttttccttgagaactgctagccccgtattgctagccagatctcatggatgatctgacttgggtttcatctgtccaggttggcagtggaatccctctgaccggccctcctttgctgaaatccaccaagcctttgaaacaatgttccaggaatccagtatctcagacggtaaagtacccatcccggggtacctgcagtggggtgaaagggcagccatgtgggactgcagcctgggtcattcggttcacttcctggtgaaagttcacagaccagcctgtcctgagaccagaaagctgggcagaggtgtggagtattgtgctttcttgtctgctgcagccctgcagagttctaagaaatgctaagggctgtttctccggtatccacgtgccttttctttagttgtatgcagatgagcactgttaccttacaaagaaagagaaccaccacaccaagccaacaccagtactgatggctgctggatttttgtttctgtccctgtatgattcttagaagtggaaaaggagctggggaaacaaggcgtccgtggggctgtgagtaccttgctgcaggccccagagctgcccaccaagacgaggacctccaggagagctgcagagcacagagacaccactgacgtgcctgagatgcctcactccaagggccagggagagagcggtaagtcccccgcttcccccaaccccactgctcttcccttccctgccagaggctacattcaggccatcataggccaacgggaagctgtgaatggagcccgcacagaagggcagccatggcctttgtcaatggttcagcttcggaaggaggaaggttctcctctccccacctgcctcctatcccctccctctgagagtccccgaggagcataggctccagcagtgagttcagtcctgtaggcagaggtgcttctgaagcccgccaaggagctagcccatctcccacctattacccgcggcatctgtggttgctgtctcagagcagattcaacaatagtaagcaccaggctgcgtgacaagcagctcacggtgaaggcactgatgtgagaagctcgctgcagccaggtggaaccaggacacgcacatggacagaacccgtgtcctggtggtctctgggaagagcatctttctggtgccattgcctaggcgagcaagggagttgggatcagctcaggagggggtctcaagacactagcaaaaataataatggccaacatttatgtagtgtgcctactacaggccaggctctgttctatgttcatggttgacccccagaaccagcagtccaggttctgctgcagaccagctgaacaaaagcattgaggggtgtattagtctgttttcatgctgctaataaaggtatacccaagactgggtaatttataaaggaaagaggtttcactgactcacagttccacatggctggggaggcctcacaatcatggctgaaggtgaatgaggagcaaggtcacatcttacttggcggcaggcaagagagcttgtgcaggggaagtccgctttataaaaccatcagatctcgtgagacttattcactaccacgagaatgtgggagaaacctccccatgattcattgatctccacctgaccccaccgttgacacgtggggcttattacaattcaaggtgagatttgggtggggactcagccaacccatattggaggtggggggtaggccaagcatctgggttcacagaggatcctggggatggcaatggtggactccattctaatggactgcagactgggtacatgtgaagggactggacaaagccctacttcttgaagatttatggtgggatgtttactgacagcagaatctataaacctgagttttatcacgtactctcattagtaaaaaaaaaacaaaaaaaaacagaacatgcagcccatatatatggtatataaagtacgtatgtccactactgtaggagtagagtgcgtatgttatgtaccaaaacgcacatttaaaaggcttgcatgctaaataagtccaaatttgcaatacttcccgccccgctgggccatctcactcacctacttggaggttatggcgtatagactctccagaatcttccacccttcctcctcttatcggttttcctgatttcaggtggctgagcagtagggaggagaggcctctgggaacgctgtgcttattaagaacccagtgatcagcagtcatgttcatttacgcccgtcagtttcatctgaggggtattttgatagtgatctcttggtgagccgagggtgtcaattaactgctcagtgctgaaactgagtggtgcataattcattgcaatttcactctcctggcctccttccactagattaaagttttgggagggctttggtgttccctgattcagatgtcccgcgtgctgccttgggttctgataaatgcatactggtacctctgttgagttacaggtgccaacagaaaacctcttcttgcaagctgacctctgagggagaattctgttactcactagcaggagcttggcaacaccaaaaagatttccttttttttttgagatggagtctcactctgttgccaggctggagtgcaatggcatgataccagctcactgcaacctccacctcctgggttcaagcgattctcctgcctcatcctcctgagtagctgggactacaggcgtgtgccaccacacccagctaatttttgcattttttagtagagacggggtttcatcatgttggccaggatggtctctatctcttgacctcatgatccgcccacctcagcctcccaaagtgctgggatgacaggcttgagccaccgcgcctggctaccagaaagatttcttatgagctatgattcatatttaaagagtgcccattaaaaaactgttggccgggcgtggtggctcacacctgtaatcccagcactttaggaggccgaggtcagcgaatcacaaggtcaggctcccgtggcacaagctgggggctgcccccaccccatgctccccagaggagcacccaagcgtctgggctcagacaggcctggatctgataaccggctctgatgccaccatccctgaggccaggcaagtcccagccgggctacagcactgttgtgagaatgcagatgaggttgtaaaggtgaagcacgtgtcacgcttctctcaataaagccatcattgctgttaggattgtcattaggaaaggctttgggccgggtgcagtggctcatgcctgtaatcccagcactttgggaggccaaggcgggtggatcacctgaggtcaggagtttgagaccagcctaaccaacatggtgaaaccccgtctctactaaaaatacaaaattagccaggcgtggtagcgggtgcctatagtcctagctacttgggaggctgaggcaagagaaccatttgaacctgggaggcggaggttgcagtgagctgagatcgtgccactgcactccagcgtaggcaacaagcgagactccaactcaaaaaaaaaaaaaaaccacacacacgctttggtctctttccctgaagatgggaacaaaaagctggacggccctggcctcttcatccctgcactggtttacttgaaggcagcagccccccacccacccacatcactctctagtgagtataaaaacgatgacaaggccaagcaaagggtcaaaacctgtggctctcctgccagccagctagccgagaggcctatgaggagctctgggaataaggggctgtgtcccacagtggggaagggacaatgggccattatgcacaggagataagaagggatgacctttgacaatttttttgtttgtttgtttgtttgttttgagatggagtctcactctgtctcctgggctggagtgcagcagtggcactctgcctcccgggttcaagcgattctcctctgtcagcctctagagttgtctggagttgtcagctcttccccttgcgtttcagatcctctggaccatgagcctgccgtgtctccattgctccctcgaaaagagcgaggtcccccggagggcggcctgaatgaagatgagcgccttctccccaaagacaaaaagaccaacttgttcagcgccttgatcaagaagaagaagaagacagccccaacccctcccaaacgcagcagctccttccgggagatggacggccagccggagcgcagaggggccggcgaggaagagggccgagacatcagcaacggggcactggctttcacccccttggacacagctgacccagccaagtccccaaagcccagcaatggggctggggtccccaatggagccctccgggagtccgggggctcaggcttccggtctccccacctgtggaagaagtccagcacgctgaccagcagccgcctagccaccggcgaggaggagggcggtggcagctccagcaagcgcttcctgcgctcttgctccgcctcctgcgttccccatggggccaaggacacggagtggaggtcagtcacgctgcctcgggacttgcagtccacgggaagacagtttgactcgtccacatttggagggcacaaaagtgagaagccggctctgcctcggaagagggcaggggagaacaggtctgaccaggtgacccgaggcacagtaacgcctccccccaggctggtgaaaaagaatgaggaagctgctgatgaggtcttcaaagacatcatggagtccagcccgggctccagcccgcccaacctgactccaaaacccctccggcggcaggtcaccgtggcccctgcctcgggcctcccccacaaggaagaagctggaaagggcagtgccttagggacccctgctgcagctgagccagtgacccccaccagcaaagcaggctcaggtgcaccagggggcaccagcaagggccccgccgaggagtccagagtgaggaggcacaagcactcctctgagtcgccagggagggacaaggggaaattgtccaggctcaaacctgccccgccgcccccaccagcagcctctgcagggaaggctggaggaaagccctcgcagagcccgagccaggaggcggccggggaggcagtcctgggcgcaaagacaaaagccacgagtctggttgatgctgtgaacagtgacgctgccaagcccagccagccgggagagggcctcaaaaagcccgtgctcccggccactccaaagccacagtccgccaagccgtcggggacccccatcagcccagcccccgttccctccacgttgccatcagcatcctcggccctggcaggggaccagccgtcttccaccgccttcatccctctcatatcaacccgagtgtctcttcggaaaacccgccagcctccagagcggatcgccagcggcgccatcaccaagggcgtggtcctggacagcaccgaggcgctgtgcctcgccatctctaggaactccgagcagatggccagccacagcgcagtgctggaggccggcaaaaacctctacacgttctgcgtgagctatgtggattccatccagcaaatgaggaacaagtttgccttccgagaggccatcaacaaactggagaataatctccgggagcttcagatctgcccggcgacagcaggcagtggtccagcggccactcaggacttcagcaagctcctcagttcggtgaaggaaatcagtgacatagtgcagaggtagcagcagtcaggggtcaggtgtcaggcccgtcggagctgcctgcagcacatgcgggctcgcccatacccgtgacagtggctgacaagggactagtgagtcagcaccttggcccaggagctctgcgccaggcagagctgagggccctgtggagtccagctctactacctacgtttgcaccgcctgccctcccgcaccttcctcctccccgctccgtctctgtcctcgaattttatctgtggagttcctgctccgtggactgcagtcggcatgccaggacccgccagccccgctcccacctagtgccccagactgagctctccaggccaggtgggaacggctgatgtggactgtctttttcatttttttctctctggagcccctcctcccccggctgggcctccttcttccacttctccaagaatggaagcctgaactgaggccttgtgtgtcaggccctctgcctgcactccctggccttgcccgtcgtgtgctgaagacatgtttcaagaaccgcatttcgggaagggcatgcacgggcatgcacacggctggtcactctgccctctgctgctgcccggggtggggtgcactcgccatttcctcacgtgcaggacagctcttgatttgggtggaaaacagggtgctaaagccaaccagcctttgggtcctgggcaggtgggagctgaaaaggatcgaggcatggggcatgtcctttccatctgtccacatccccagagcccagctcttgctctcttgtgacgtgcactgtgaatcctggcaagaaagcttgagtctcaagggtggcaggtcactgtcactgccgacatccctcccccagcagaatggaggcaggggacaagggaggcagtggctagtggggtgaacagctggtgccaaatagccccagactgggcccaggcaggtctgcaagggcccagagtgaaccgtcctttcacacatctgggtgccctgaaagggcccttcccctcccccactcctctaagacaaagtagattcttacaaggccctttcctttggaacaagacagccttcacttttctgagttcttgaagcatttcaaagccctgcctctgtgtagccgccctgagagagaatagagctgccactgggcacctgcgcacaggtgggaggaaagggcctggccagtcctggtcctggctgcactcttgaactgggcgaatgtcttatttaattaccgtgagtgacatagcctcatgttctgtgggggtcatcagggagggttaggaaaaccacaaacggagcccctgaaagcctcacgtatttcacagagcacgcctgccatcttctccccgaggctgccccaggccggagcccagatacgggggctgtgactctgggcagggacccggggtctcctggaccttgacagagcagctaactccgagagcagtgggcaggtggccgcccctgaggcttcacgccgggagaagccaccttcccaccccttcataccgcctcgtgccagcagcctcgcacaggccctagctttacgctcatcacctaaacttgtactttatttttctgatagaaatggtttcctctggatcgttttatgcggttcttacagcacatcacctctttgcccccgacggctgtgacgcagccggagggaggcactagtcaccgacagcggccttgaagacagagcaaagcgcccacccaggtcccccgactgcctgtctccatgaggtactggtcccttccttttgttaacgtgatgtgccactatattttacacgtatctcttggtatgcatcttttatagacgctcttttctaagtggcgtgtgcatagcgtcctgccctgccccctcgggggcctgtggtggctccccctctgcttctcggggtccagtgcattttgtttctgtatatgattctctgtggttttttttgaatccaaatctgtcctctgtagtattttttaaataaatcagtgtttacattagaattcttggcagattgcttcggcctgtgatcctgccctgttgttctgagcctgtgcggtggcggggccgggatgtagtgggttctggtttcccgacggggctggggcccggcatcaggtcttacagagcagaacggtggcaggttgcccccagctgcccagggcctctgcggcctgggtgcccacagccatctttcaggcacttgccctgctatgctcggaccctttctgtacccttggcgcttacctgctggcagcctggccccaccggcatcactgggagtgggctgtgccaccatacaagccacatctgactggcggtatcaggctgtcgcagcgacgtggaagtggggtgaggaggtcacgtcccgtgcttcttgctggctgagggcaaatccctccccacgtgcgcctgttctctctccacctttccgccctaagcccccaggtgcccttactcactcatgttccttgagccaggtgtcttaggtctttgtgtggatgaggaggagcggaggtgtgaggtgtgctgggccttcagggcctgggaaggccatcccagactgagccccaccgccctttcccagctcagtccccaccgagctgacagcttggaaaggggcggttgggaagtgagtagcaccctctgataatgatactgatcaggccagcaggtttgtcaggggtgcacatcctgctcagcagagcatatgaagatcacagcttggtgaagctccactcgagagacctggagcgagactgctgtgcggtgggtgacaggtggaactccagccgggccggggctggtggagcccactgcgagcagtgccaggcacaagattctccccctctcatttcacagggacaaaaccaggctggggcccccaatttccttgccggttgaaccatagctggccaccagatccaccaagcctggggcttctcttgtcctttgaatggctgcttctcccaggtctgaacgaagacataggacaactctggtgacagccacagctggtggccgcttcctcgtgtcagatgtggacggtcaccccgccctcccagcgctaagcgctgagactgcgtgtccagagtcggctcctgcacgtgaggccaattggtcacactgggccagtgtggaggaagacgcctctcatctcccaaatggggatctttcatgggtgtcacctgagcttatagagcttagtttagtctagccattccaagacagtggtttcttaaccttttctaggtcacaaaacctcctgagaacctaatgaaaactggatcccagccccagaaaaatgcacctgtgtgcacacacccagcagtttccaggtcatttcaagtcctgccttcgaggtccattgttattatttacaaaacaccagcctaaggtattggacattttcttaaaaggccaggcaaggtggctcatgcctgtaatcccaacactttgggaggctgaggtgggtggattgcttgaggccgggagttcaagaccagcctgggcaacatagaccccatctcacaaaaaatacaaaaataagctgggtatggtggcacctgtagtccagctactcaggaagctgaggtgggaggattgcttgagcccaggaggtggaggttgcagcaagctatgatcgtgccactggattccagctccagagtgagaccctgtctcaaaaaaaatttttttttcttttttctttttgagacagagtttcgctcttgtctcccaggctggagtgcaatggcacaatctccgctcactgcaacctctgcctcctgggttcaagcgattctcctgcctcagcctcccgagtagctgggactagaggtgcgcaccaccagacccggctaatttttgtatttttagtagggacggagtttcaccatgttggtcaggatggtctcgatctcttgacctcatgatccgcccaccttggactcccaaagtgcttggattacaggcatgagccagtgcgcccggcccaccactttttttttttttttttttttaagacgagtctcacactgtcgcccagtctgtagtgcagtggtgccatctcggctcactgcaagctccgcctcccaggttcataccattctcctgcctcagcctcccaagtagctgggactacaggtgcccgacaccactcccggctaattttttgtatttttagtagagacggggtttcaccatattagccaggatggtctctatctcctgacctcgagatccacccacctcagcctcccaaagtgctaggattacaggcatgagccatcgcacccggccaagcccaccactttttttaatgagagagtttttgttactgtcctcctctgacaggtaaggaagctgagaggctcagagatgtcaagcagctcggccaaggtcacacaacatgtaccagctggtgcctaccacggcagtctaatcagtagacagtgcagacagccccaacaggaccaggagagaactgtgcccagggccggatttctccctccacagtggaagagaagcagccaagtattacagccagcccagctccttgggccgcagagatcatctcaggaggcctttctaaacggagtgccctggggaagcaaactctaaacgtcctcgtacgagaagacattaggtgagaccaggctgaccacagtgtccctgtcagcactgccctcgtccctgggggtcacctaatgtcttgctcccctgcccccacactccagttgatatcactgctgtaatcagggaaatctctgagctctttttctgggagggcatttccgaggggccaaggagctgcggattggaggagcaccagcagcacagggcatgcccctgctccctacccagaagctggaaagtaccatgtcaggtttggggtcttcagtgaaatctgtcaagcagcgtctttggcactggggcaaagttaggatgaggtggcttccctcttgattactacagcagctgtctatggctgactgtccccaggagcctgttttgtttggggttttttcttaaatatttttattagtatttcaaacatacaggaaaagacaaatgttttccattcatcttgatagctaaatacctttagatctacacaccaagatgaagaccgccttgtgtcttggataaatgtaacgagcagatgctggcagctcgcaggtgctctgggctggagtagttagaactgccgggccaggtggagtgagccagcactgctcaggggagcttcatctctctgattccaaaataaatgttttctggagtctcaacttcaccctcctggagaggggtaatcttatctgtggaggagagagcaagggctgagggggcgctggggtggcatgagaggcccaaagaccttgacagacacggtgggcttggccgcggggcaccgggttaaagaggaggcttagccaagcccagcgggagttgatttgacagcagtgcccttagcagcttgattgttcggattttcagggctactgagctcaagtgtacaagcaaactggaaagaatagctttgttgggttttttaaagtgataaaagcataatgacagcatatccactgctttgaaggcatcccccgcccccgtgttctttatctcaggtttttccatcaaggttaatctaatcctgctaaattaacaaccagccagtgcatccccaaagagcctgtggaatgtgcagggtggctcagcctcggtgttctctaaagtactggctgtgggtggctccttgctcacttgcagaagttggcaagtgacgagtggccaggggaccgtgcgtcagggcgtccctctgccctcagcctgctgtgtttcacccggtctctggtgagcacatctctggctgctttgcgtgaatgagccaagggagggatagatctagcttactgcctccccctcccttaagccaagcagaatggggtgtgtgtgcacacctgtggtgaacgaatctgtccgttcaccctgtgccagggccgtccttacagcaaggaccccggggatgtgtccgtccccatcagtgtcatgttagcaagcagtgacaacatccctttgcaggaggcatcctgaaccactctgtcctcagacagtggcagagcccaagagaacaatgtgccccacccctccaccagcctcaggaatcattgtcttgtccccatcacagcagccctaagactcagggcacatgcgccaagcctggggggctagtttctgtgtgggaagcgatggggaagcggtgaggagctcctggagaaggtggcagctttcataccgggtgatgttctgactctggtgttctctcccatctcagcacccattctgctccccagtcaggttggttctttgtggctcagatctgtcaccccttaatgaagtggctttctggctgccaaggattgagagctgctactgaggagtataagtcactaatagcatggaaaacactgtgaaatactccaaggtgccaagctgggcccagcccagtgtggttctaaaaggctaataaaaatccaccaattaattgtgacagctcaatgggaaattattcaattgtgaacaggggcaagctgcagctcgaaaggaggaggggaggggttgccatagtaacatcaatgtaagttctcatctcagcagcggaagccagcccgggagtgagcagcatccgaccgccgcctctgacacgggatgggatgcaggagacaccaaaggcgcgtttgaaacagatgctttgcctggccccgggcctgcagccactcccggctgagcgtgggctctccccggggcagagaagttgttttccgaatgttccttgctcttaggaaacctgggaaggagcagccgagtggaagtgaaaagcacatgtgctgtgttcctccgcccctttgaccgactgccggttacagggatctagaggaggggtgtttgggtccagtcaacaggagctccatctcccgaaaggcaaggcacccagaactcagactgtgggggaggccagcattccagtatggttttgcagttgtcacaacttttatttgaaaagatacacacgacatattctgattttgaacatgtgaaatgcaaccttgctatagcaaaaacgggattccttcccaacgcatctcccaggagactcctggccgggctaacactgggccgcggagaagggctgcggtcagaggggcaggcaaaccacagcaggggcttcttgccagggggatcttgtgctcatggcatggagaaggggatcgggttcttttttcccatttttaactttcagaaccatcctctgtacccagtggaatgcactcatttgcactctgatgtcagccgcagtcgtgcctatagagactgtcacaactttgattacccaactgtaagcactcagcccgctgcctcgctctgctattcacactcatggcccagccacagcctcagctccgtgcccctggggccagggggctgctcggagtcaaagccccaggggaagagagaggctgggacgaccgaggctccaagacagcctcctttttgacactgcctagtttttcgcttcagcaaagttggaaatcaaaagtaagcacacacctaacctgtcctaccatggatcgttcatcgtaaccaagcctacatcatctgggtgtcgtggtctttgagactgggggagaaggcaggagtgaagacaatgggggtgagtccaagaagcaaatccttccaaggcgtcctggcccttcaccgccgaccgaagcggaagctgaagccgcctttcttcctgctgtagccattgagctcctcagccaggttccctaacgggccgctggtcttctcccccgcagcagggaggaagccggtggcctcactgccttcgtcctgcctcccgaagcggaatctgcagccagcatgctctctgcccgatgtctgcagccccctggctatgacaagcagggcctgtggctgtgaagctctcagccaccgagaggaaccccacacggagtggggtcggggccccatggccaggtcggcccagcgttctccagctccgaggccacccatggcgtctgtgggctctcttctgtccagtagagggaagcaggcgcccagcggcaggaagaggaagtagatcagggggtaaggccttaccatctgacccagaggaaagagaggcagagtgacaggctgcacacgtggccaagcgcaactcaccaaaatgtttccccgggacaggctggcagcgtagatgtgagcagggggctcagctgagcccggcttccgagcagtgctgggactaggccactgttttattagcaggatcaggaggtgattgtgccagttaggccggttcttctcctgcagtccccacgatctgcgtgcctgggcagcttagcaccgtaaatccaccgctgctggctggcagagcagtgcccaggcggccccgggagagtcagcaaatgtatgctcatttttctcttattataaaatggccatatcattgcagagccatggggtggaaagttaaaagcatcaatctcccttagtgttcaactggataataaatgggtctagctatgctgtttagctgggacatcctgctaatgtctctttcacgtgggaacgagttgctcctgaaagccagaaacagattggatggtcctggcctaattcggacacccacctgggaaggagtgtgtggacaccactggggcctgggcaccgtaggtctgccaggctctgagccaagagctcacacatgtgattgtacttcatcttcatagtactcctgcttggtaggtccggccagtcccactttttcaggcaacaaaactgtcagaaaaactgagattgtgcccaggccacacagccagaaagtggaggctctggattcatgattctaatggccagacggcttcttcaagaagcatacatatctgctaggtactcccaaccctcctatttcacaggggtggtgtcggtctcaaacagctgaggtgacttgccccagatctcatggccttatcagtgccagagctagagttcaatcccaggtctaactgggcttgactcaggaaggcgtgccctaactccctcctctgtactccacatggcactcgggggatctgaaacccagcctcctgtaatgaacctgccttggtaacacttgctcccttgtctggcaaagaaaacctttttgacaatgaccgcgggggagctggagctggctt

SEQ ID NO: 3 - DNA, 1552 bp, Homo sapiens
ccacttcaaaaaaaagcaaacacattttcctctggcttttggctgttttaggaagaagccatacggtgaaccaggtgatgctgaggttatctggatccaggccatgcagatgaagccatatttacctttgtgatattggggctgatcttggagctgtctggatctgaccagtctccagatgaaaactcttgcaactttcgtttttggatagtgctcacctcgtatctgtactcgtacctgctatttctaggcgaattgtcccctttctcctccctcttccctcatctccctctctcctctgcctggctgacaccaggaaggaggagttttcttttatttagataaaaaaaagttgagaggagggagctccagaaatgtgggatactcagcactggagacatttgggctggaattcttgtttccattcttttcttaccatatgaccaagtaagtccaagaaagtagataggattctgagtgggcagtgaaggtggaaatgtggtcctaaagagaacgggcaaattaagaaaagattgttttaagacagtcaaattgttttgcctgttgaagaaggtgatcagaccctaatgaaactgaaaatgaggagagtgttcccatctcctgcctggttctagcgactctgcaaatgggtgcctgattggtctgttggctctgaagccagcctttgctggatatattcagcctgttttgaagttgtgcagagaacctcacttgcgtcattctgaagacgcagtgagtcaacgcagtcccaagagagcagtaatggccccaaacagaaacttggaatgaaaaatagccatggatttaaagacatagcacattcttcctatgacttcatttggtaatggtaagattaattcacagaaaacccttcttgagtggcgtaccttaaacacatgtagaatgatttttttctttgcttttcccatttagccttttgaaacaggatacacagtagggtgattggtttgggagggcactggtacagtaattctccacctctcacttgcccgtgtgggtgccccatccccaccctcaggcacacacgcactcttagctgcttttggactcctcccgcaatgtcacaatagttttctttgaacattcttgaccctcagtcatgttgacatgcgtttggattttcagtggagaagaattgccagagaagaatcttcctctgattttaaccattgaccatatttatatatgcagtttcagcttgacttttaaattgataatcttttaatagaattccagataacatcttactgtaacaaacaccaaggggattatccaaattcctatttgaaaatatgtcttttatattaccagatttgccagctgcattattatctattagtgtgtactaaaagtatattattttggcttattttgagattagataattcccagtggaattctccccttaaccatctaaatctgtattttttttttccccatttagtttcctaaacagtgaggcttctgggcaggaaatgagagaagaggaggaggtaatatagaataatgc

SEQ ID NO: 4 - DNA, 1272 bp, Homo sapiens
gctttatgaactagctgatttagtttgctcacaagctttgaaagagtctttttttaaaggccaagtttaagacaccttagaccatagaaatatgtgtatttcctggccattcgatcatttgaaggccagattttatcaaaacaaatgaatcactgtttctccttccttcatcattccctaattggtttccaaaataaaatgattagtggctgcatttctcaactgcattgttttgattacagtcttactggctgtattgggtgagacattgggaaatgctttcataactggtgatcactgttgacggggttccctgacttcataaaggcccagattatgttaccccgagaaagtctttgaaggagcaagctctttcttatgcttttgttattaagttagggaaaatgactttaaataatggaaccttagttacaatgtaggttccactcttcttgagatttgtgttactttttagacatgacaaaagtgtgcattttagagttcctcttaccccaggaacaatggactcacttggctttcaaaagggcagaatatactgagtatttctgactgcaggtttcttctttctggtaccctcaaaaatacaccataaatagtagattaatctcccttttgctgtccgtgagtcccttcccgtttcttcagcactgcttgatatgactggtatggaggcctaaagctggctggcctagttagtgttacccaagtggtttcttgtgagcatccatttgcatgcagttgggccttttgtccattggtgaactgctccttgccttgaggtcctgtagctagtttgccactgagtatttccttcaaaaaacaggaaggatgccctgatattatgaagtgggtggttttagaattccacttcagatggcactgacctttccttaatacagctggtttcacttaatacattttgtttaaacaaagcctgttcctggaagtggttccagaatagtctgttccttgtagctgttcctttgctcttaattttaaaagtgttttcccgacagtatcatatgtgctcgcacgacagattagaaacttctgcttgaagtcatcacacttatgaattacgttgtgtccagttatgatatattgatgattgtattcagtagcttgaaggtttaagtgataactttattttgcaaaactgaccacattcttttgttgcttaggtgtctcccctttaagggattctgatgtctagcagtctcaatggacaaaacagataaaagagagaatgag

SEQ ID NO: 5 - DNA, 2207 bp, Homo sapiens
tagttctaatatttatgctttttggagggtgaagggcttgaaaggcatcaaaaaccttggtttctaggagcgagccaaattttctcccttagagactgaaggaggttatccgactccgcttccaggaaaatccaatccgcaatttttccctcgctttggctcttccaggtctcactactcgcgccggggagacgcggtccggcctacgctaggccggcaagaatctaccaggtcccaggagggcggggccgagccccagaagtcggggcccgggccaggagtcttggtgcaggcggactcgggcgcgtgccatgggaccacaactcccggcacgcaccgcggactgcgccgaacacggttggctgggagatccaaccctactgctcccaccggccaatgggacggaggaaagaggcctgacccggattctcggaggccaatggcaatacagaggaggcgggtgcttccttaccactcaccttgcgctcagagaagccacatttaaaaggtcgtgccgggccgggctttcgcaggcagtgggaccagagccgggaggggcggcggtgtcccgggaaagcggctcttggggcatccgggtcccctcgaggcgggctccggacgtcgccgtgggcggggccgagggcggggcctggcctcgttgtggagcggctcgtaatccatcatggcggccgcggggtttggtgtctgtgcctgagcagcgctggagccggagccggttcccgggtcctgcggctgaggagcccctccgctgtccacggcccctaccggcggggggcggctgggtccctcggcggagctcgggagatgtgactgcctgagggcggtggtggtgtcagcgtccggggccgggggagggggtgtctcgggcagagacccccgggcttggggcagctgaggcggccgggcctcctctacacggggcccgccttccgctgtctgggccgcgagagtccttcgtcccttacagccccgccccggctttgggacactgcgggtggtctgtttcccccagcttgggacaccccgttttctgaggcgtggaagagcgtcgccccggagtaagctgcccgtgccgcgccccgacagcttccctcagccccaagccgccccttattccggatcccggccccaactttggccacggagcctcccattcaaatccctcccttgctgtcaaggggtctccccttcccccaaggtggctcccgcgagcctctaatgccctgacttcttccaatgtcacctacggcccccttagtctcagctcagccaaaaactttaatgcaaaggaaaagtctggattggttccacaggccttttaaaaagcggacttaaaagttgctggcaatgcattccttttcgtcagagtcgagggcaaactcgctgaaatctgggtgacccgtgtccttttccggagagcaaagcagagaagcgagagcggccactagttcggcaggaaatttgttggaagatgaagaagctaagatagggggttggtgacttccacaggaaaagttctggaggagtagccaaagaccatcagcgtttcctttatgtgtgagaattgaaatgactagcattattgacccttttcagcatcccctgtgaatatttctgtttaggtttttcttcttgaaaagaaattgttattcagcccgtttaaaacaaatcaagaaacttttgggtaacattgcaattacatgaaattgataaccgcgaaaataattggaactcctgcttgcaagtgtcaacctaaaaaaagtgcttccttttgttatggaagatgtctttctgtgattgacttcaattgctgacttgtggagatgcagcgaatgtgaaatcccacgtatatgccatttccctctacgctcgctgaccgttctggaagatcttgaaccctcttctggaaaggggtacctattattactttatggggcagcagcctggaaaagtacttggggaccaaagaaggccaagcttgcctgccctgcattttatcaaaggagcagggaagaaggaatcatcgaggcatgggggtccacactgcaatgtttttgtggaacatggtgagtgcttttcaaaatttctgctcatggttttcctcatgcattcatcttaggccttcaaggaactttgaacaacagtacttgcgacagttccttccaattccacttaataaatttgtt

SEQ ID NO: 6 - DNA, 2200 bp, Homo sapiens
ctgtgtgtatgattctccaaaggtctgcccagtatcatggtctcagccagctcttggctccatttttccatcggtggtggtactatgccacagcaggtgttattatctcaccaccttattctattagacgtatgtttatcacttcgaagaaaaacaattttactatgatctcagttgccaggctagtacacatgtgcttatcattctttgtttgcttttcttttgagtcaaggtcttgctctgtcacccaggttgaattgcagtggcacgatcatcgctcacttcagcctgtaattcctaggctgaagggatcctcccacctcggtctcttgagtagataggactacaggtgtgcaccaccacacccagatttttttttttttttttttttttgtagagaagggtctcactctgttgaactcctggtggcctcaagggatcctcctacctcggcctcacaaagtattggaattacaggtgtgagtcactgcagctggccttcacttatcactgtgaggagtaaacagctgcatggtgggcttaatgccatctaacacgagtgactccatgttcagacagtaggatcacaaatgattattatatagcaatgaatggccacaggtacatagactaaggagccacatccctgctcctgggatatcctttagtcaaagggctagaagggtcctggaggtttgccacttctccgtgttgaggtacagagttcctagactaagggactggctgcattgttatgtgtgagtgctagtcatggtgctgcctggcacccacaaatgccacagcagacccatggtcgagggagaggagcaggaataccagttaccatgccggagtaacagttacggcactgatgcaccagttaccatgccagagtaacagttacagcactggtataccagctaccatgccggagtaacagttaccacactgatataccagttaccatgccggagtaacagttaccgcactgatgcaccagttaccatgccagagtaacaattatagcactggtataccagctaccatgccagagtaacagttaccacactgatatactagttaccatcccagagtaacagttaccgcactgatgcaccagttaccatgccagagtaacagttacagcactggtataccagttaccatgccggagtaacagttactgcactgataataccagttaccatgctggagtaacagttaccacactggtataccagttaccatgccggagtaacagttaccgcactggtataccagttaccatgccagagtgactgattttgaccaagacctttgggttgtacagaaggggtgagaccatacctgtcctcaagcatttccaacctagtgtagagaaaaacaggagcaagataagaacaacgtactgaaaaggaaattggatgagggcctggaaaaaggggtaaagtgagctggttgggattggtgagtgccacagcttcctgccccttaacagatcagtgccatggtggctgtggtgtccctggcccagaccttctcagacagggcctgggtgccctttacagagcagttgggaagagaagggaacctagccttgtgaccttttgctccacagacctagtcctttgttgtggtgcgaggctcagtcgtcagcccaccgagtcatgtatgttctctggttgcccctggttttggctgaactcaaaggatggctgtctgtgaggagtactggtactttttgccacttgtgtgccctaactgtggtggatgccattttggggattatgctcagcagtgagtcacgtgagatgcacacgtagcttttcggtgattaatccaggtcaatgcccttacccacatacttctgagatgtactgatgatgactacatttaaagctttttctccattggctagaagttgagacccatttcaacaaaagcacttccacctctcctgaagtgcattgggaaaactggaggccattactagatttacagatgatgggccgtgcttaaataacccatcttagctagactccaggtttcgtcacatattccctacctgttgctgccattgagggctttctctgtgctaggcactaccaaataatgctttggtaactttggtaatttggtaaacttggtaatttggtaaatttggtaataaagagcctttattctaaagtgcaaatctaag

SEQ ID NO: 7 - DNA, 2242 bp, Homo sapiens
attatacatacccagtaagatattagcaccatgaaagctccacaaaagtgtcctgagcgcctagaacagtacttggcacatggtagatcttcaataaatagttgttgaaggaatttgttaaaatatcagagctatgatttaagaaaattattctgtaatctgaatttaggttgggagtggaaaggagtacccttaagtaggacatgagaagagcctgaagaaaggcagaggacaccagtaggcatcttggatgtgggattggtcagaggggagagaggtaaaaatgattccatgactgtgagtctggcgactagaaatgggggtgacattcacagagtagggtggttccctgtagttcctccttgtgcagaaggtgaggctttgcttgtcgacctgcttcagtagtagcattgacagaacagtctctgtgtactctgtcccctcagtgctttctgcatatgtgttgctcactcatcactatctgcatgttcgtggtctctggaaagaatcaactataatgatcagaataattgcctggtaggacgtatttcctttgagttcagcaagacgtgccccctcacatggtgttcctgttcattcataaggctgtaataatgtatgagttaggagacccttttgaccaattcccctctgttttccatcttggaaaaaccagaactctgttttcttgagcaaatgacgttgccaccagccctgaagctccttttcctgggtttgtaggggttggtggaatcctggcagtctgccgctcttcctggcctccagagatcagggctgtgactttccatctgcagatggcagttctagctgcgaggttggtggccgaggaggacgaggacacagctcagggcctgtccttcaagggcttccgtgtgcagcagcagcactctgtaatatcatagatgaatttttgtcaaaacacagagaaaagttgattacacttctcatttattaaaaaaaaatgacttgatagcatagtagatggccccttatgtaagccacttagtattatttcaaaggaagcatgtctgtgagaaaaggggcaaccacttttctcatagagaagaacaggtttttaaatgaaaagatcaacaaatccaaatgctgtggtatttatactgatttagaaaggcagttgactttgggaggctttgttttctcatttcccttttctccttgacatttgacagacgtggttagcagagagctttctcattcggttttcctggagagagctctgcctcttgggcttcctgcatttgtatggaagttttaattttttttttttttgtcaaatgaaaggttgccatttcatttgttcagatttcccacacactgttgcagcaatctttagatttcaaattggctaattcagtgggtcacttaattcttaacttttacaacattttgagtctaaatacagcaaaattggtgcctttttcagctatttttcggcgttgctatattccaagccactgagctctgttttactctgacattttctcttcacttttgggattctgctcactgtgtttaaggcagctcgatagcattttgccaaaaaagagaagttagggctagtgtgagttgaggggaaggggatgtttctgttgttgctccttgctgagtatcttcagatatctaaaagaaacttgtaacacagcgtcagcctgacactggcctttgcagcatcagccttggttgactgtgttctaatagggatgcctgatctgtatcctctttaacttggctataagaaggttttggagaatgtatgtctgagggtgttttaaaagaaaatggaaacaaagctcctttttgccttgagctcatggtttggaatttgggcatttggaatccttcaagccctcctcctgggcagagctggagtccccttagggcactgcctgtcatcttcactacacagctgtgctccagagcagggagccgatggaaagggggacccagaacattccattctgcagaattcccttccagccgtctgtgagaaggcagtttgggacccttttagaagtttgctttataagtgaagaacctgaggccggctgtgttcatattctcagaacttggtgagaatgaggtactttaagataggctctaagatcagcagcatcagcccactcgggaagagctcctctgactcctggaggagaaagccagatgggggaagcattaagtcctgttttcctattgaaaactg

SEQ ID NO: 8 - DNA, 1995 bp, Homo sapiens
gcatgattagggagaggcagcagccctgactgagcacctgagtgttcatggaaccaggtgcatagcgtaatgacatgccattcatgacactactttcttccctgaacatgccatgaattcctgatgattacacagttccccaacaagtgctgctcaaaacctggaactaatcagaaggaagcaccagccttgactgttagtgggacacggggaagatggctgtgaaccaaatatgcggtgcctttgggggagaatggttttagtatttagtaagtgtcagtatgtaagttttatgttgaaaaatgaactaagtcacaacaaggtctataaatttaattattgaaaaggataaagttgggccattcagtgaaacctcctgtaactgaagtctctaacacagtagccaatgggggaatcaaatgagcccaagaagaaattctgcgtaaactaggacttaggggagcccttagcattccactttggagtgaaggaacccgatccgccagttggggaacgctcctttgaggcccatgtgcttcctgctccgacgggagagagggataatgagacttgctcccaggtgccctgccctggagcccagcaggccacacgggctctttgactctgtactgtgccagtgatttccaagatgggagtggtgctctgattgcaggaatgtcttcttggaatggcttttctcacttctctagagtccttggtagggagcacatcatcagctgagctaacgtgagaacaggggttggagcacttgccaccggcagtgaagtaatcggacagctgacagtcttttccagagggtcggggattgggagctgaccccaggtcccgctccgttttctttgtgtgcagcacttgtgttggtgaccagcagtgaagagagtgcgtggacgtcaccgtgtggttatgaagctaacggcagccctcagcggtgccgacttccgctccccgacacattcctgtgtgcacgttcgtgggtctgagcgtgactcatggtgtgtgtccctagagcagttcactcagaggcttctcttccgtgctctcaagaataaaagcagggccgccacatcctgataagtcttgccattcagcggtcctgtcttgcagagggataagccagtgtccccaggccacagtccttacaccttgagcaagttccccagagtgaagcaatctttctagacaagttttgcgtttctcagaattttattttagtgatattgttaccaaaagattgtaaccccaaaatgtgtgcctttggcttgcctgttttaggaattcacttgtgttatctccccaagcaaaacaaaagaaagagaaaccttcctgttgacgaatcctttttaccttcttgagagttgtcaatgggactaacttgtatatttctttgctaccttcttttaaaaacatttttcttatttactattacagacgtatagtaatggtgcctgacataacccacagccaaaggccttggccttgctgtgtgtatttcaggctttttcttcccttttctttttttttaagtaataagatattacagttatagctgaagcctgatcctgttcccttttctccctctcgtcccaagcatcaccactgtcccaaatctgctccttcttcccacatctttgcagtttgggcaagtcttctgaatgcctagtcatgattttaagtcttctttccaccttcagtgatggttggctaccctgagcaagccagtagattcagttatgtgcctggagtccagatgttttatgtggatttttcatgtggaattgtttttggtaaggaagtattcccttgccacaccaatgaaaagagaagaaaacaggtagctggcacccactgcattgttgctttctgccagcctgctccttctccttcctctccagctctgttgtgtccagatgcaaactctacatgcagggtttgaccctaggtcctcacctgctgtagctctcacacggggaccga

SEQ ID NO: 9 - DNA, 3770 bp, Homo sapiens
cagtcctatacgtgagcagcattgaatccccggatactggcaggcgttcactgtccagcctttgacattagcatgtcaccctggtaaatcagagcactccatgccaaaaaacagcatggtctgctgagcacattaaggagcagagagggctcagaagaattaaacggccaatggggtggtgacagaggtgagctctttccccctcggacagcttggcatggtgactaccaatgaggtttaattgacattaagagcagctcaccatttttaaagagcgataaattgtttccaagtttcagcctcacggagccctgagctaagagataatgggctgacacatagcctcattggtcacgcttcacttgtaaacaggattggccaaagcaagaaggctgtaagtaaaggttggcccgtcctctggaagcctcccccacagcagggtggggaactggggcagccatagcaagcaggaccatcaggacacggtgtctcccaaacgggccggaacatacaaggttctacgtttaatagaaagttgatcaagccttcctctttggggagcctaatttttaagccattcactctctgttcccctgcagtcttttctctccaaactctgttgaaacttggaggcatctcgcttcctcctttggcctttgtagccaggttttcgcagcaaacagaccatatcatttaacacccacctgcttcttgttctgatagtcagttcagtagacagtagcattttttaagtcaaaaagaggcttagtgatgtaggccaaggtcaaggctctgtgtcatggggctctccccagggctcagtgccacggcacttcagacttgaccccagactgaaaagatgagaggacctgtagaagtcacggcctgtctgtcccgggcccatgctcctatctttttctcccccttggcatttagataccatggacttgttaaaatgtgacatgtactgatgatccttatgaatttgttggtaggggagctgctggtgaggattattttagactgtgagtaattgacctgacagacagtgatgactgcttcattaagagcccacgaccacgtgccagaatagttcagcatcctctgttgctactgtactttgagacatcgttcttctttgtgatgcaatacctctttcttgtcatgagggtctcttcccttaaatcaggtacatttcagattcttcaggtgatgttttttaggctgagtgtgttagcaccccttggaaaccaggttccctggggaaagtgtgtcacgtttgtggtgtttgcccgtatagctctcccacacccccacgagctccaagaggtggggaagcacatgtggcctgcctagcaggcaccagaagcaggttgtcggcacatgcaagccagctttgccctgttgcctgggggagaattgaaaagtttggccccaaaggggaaaattctttctgccatcaagttgctggtcagctgtcatggaacctgtctgcagcaatgtggctgtcacaaaacgcagcccaggacgagtatgcgctgaagctccattttgcattaactagtcaagtacttacccactgaaaagcacttcctgaaataatttcaccttcgtttttttccttctgcaggaggacaccatggaggtggaagagttcttgaaagaagctgcagtcatgaaagagatcaaacaccctaacctggtgcagctccttggtgagtaagcccggggctctgaagagagggtctcgcgccgcacccccagggtgacacaggcgctggggaagacgcacgggcggctcactgcacaaaacctcgttggaatatttgtgctctgccgacgttcagccgcgggtaaaatgaggcctgtatgggatgggtgtgtgcgtgtgtgcacatatgcacatgtatgtatgagagggagaatgtgattattttaagtggatacctaaaagcagtcaaatgcaaatctgaaattagtttctgaaacttgggcattttccagagttttctcactgaagtgattctgtaagtagacacataaccatcagacctaaccattcaggggtaaactgacggtggtgaaggtcatttgaggtggggccaggtctgcgtctgaattctgtggcagcctctccctgcgtaaattcaagttcactggcttgagaagaagaaaagagcctggccatgtccctcccacacgagcacagtctcaggatgcaggtgcttgggaccatgttggaagttgggcccaggactgaggagcagagtcagaatccttcagaaggctttttctttagacagttgtttgttcagttgggagcggagccacgtgttgaagtcctcgttgtcttgttggcaggggtctgcacccgggagcccccgttctatatcatcactgagttcatgacctacgggaacctcctggactacctgagggagtgcaaccggcaggaggtgaacgccgtggtgctgctgtacatggccactcagatctcgtcagccatggagtacctggagaagaaaaacttcatccacaggtaggggcctggccaggcagcctgcgccatggagtcacagggcgtggagccgggcagccttttacaaaaagccccagcctaggaggtctcagggcgcagcttctaacctcagtgctggcaacacattggaccttggaacaaaggcaaacactaggctcctggcaaagccagctttgggcatgcatccagggctaaattcagccaggcctagactctggaccagtggagcagctaatccccggagtaaggaatatttcatttttgaaccattttgggctaagtggaatattaaatgaagttcataaaaggcgtccttcctaataatcacagtcccctctgaaagagagtactcattgttcctccggggccagcgcccagcagtaatggcctcttcctgggagccgctggcattgcttttacgcaaactcatgggaacaaccagtacatggcttttgttttttagtgtgtgtgtctttttttcctgctttctctttattatcttttcattctccacttaacttgctgtcctctgattcagggatgtttccacaattgtcagaattgtgtatgtggaggtctaaattaagtgtctttgctgttttaaaccctgaagtgttttgaccttcaaatgtgccacaattatcttggtcttcaaattctttgctggtggaaatggcttcccagcaaagcgacggcctgtgcaggacagagcctgatgggctttgctggcgtcttttatacgagatgttctccacaccaccactgtgacctttcctacccaattagctcaagtatgaaacctctacatgagatttcatagcaaggaataagggtagcatgtgtgaaatgctggcggctccttgtaagacagattttctatgctccatgagagcctgatccagatactcctggctttcaggaaagtgaatcctctgatgctgcaaattgagattgcttgacttctggtttgcctggcacggccgggtccgttccttcttcattcaagcgaacttaaaatgctttatcaaaatcctcttaggcacaactcttctgtatttaatttcactcttgttgctgacgatcaggctatctcacgcagccatcacctcaagctgctgccccctctcattccgctcttcccgtttgccttgtgatttcatggttaatgttcatgaaccaaagattagactcctacctccctgggagaatcaggaagtgagaggaagcagat

SEQ ID NO: 10 - DNA, 4954 bp, Homo sapiens
gatcaagaagaagaagaagacagccccaacccctcccaaacgcagcagctccttccgggagatggacggccagccggagcgcagaggggccggcgaggaagagggccgagacatcagcaacggggcactggctttcacccccttggacacagctgacccagccaagtccccaaagcccagcaatggggctggggtccccaatggagccctccgggagtccgggggctcaggcttccggtctccccacctgtggaagaagtccagcacgctgaccagcagccgcctagccaccggcgaggaggagggcggtggcagctccagcaagcgcttcctgcgctcttgctccgcctcctgcgttccccatggggccaaggacacggagtggaggtcagtcacgctgcctcgggacttgcagtccacgggaagacagtttgactcgtccacatttggagggcacaaaagtgagaagccggctctgcctcggaagagggcaggggagaacaggtctgaccaggtgacccgaggcacagtaacgcctccccccaggctggtgaaaaagaatgaggaagctgctgatgaggtcttcaaagacatcatggagtccagcccgggctccagcccgcccaacctgactccaaaacccctccggcggcaggtcaccgtggcccctgcctcgggcctcccccacaaggaagaagctggaaagggcagtgccttagggacccctgctgcagctgagccagtgacccccaccagcaaagcaggctcaggtgcaccagggggcaccagcaagggccccgccgaggagtccagagtgaggaggcacaagcactcctctgagtcgccagggagggacaaggggaaattgtccaggctcaaacctgccccgccgcccccaccagcagcctctgcagggaaggctggaggaaagccctcgcagagcccgagccaggaggcggccggggaggcagtcctgggcgcaaagacaaaagccacgagtctggttgatgctgtgaacagtgacgctgccaagcccagccagccgggagagggcctcaaaaagcccgtgctcccggccactccaaagccacagtccgccaagccgtcggggacccccatcagcccagcccccgttccctccacgttgccatcagcatcctcggccctggcaggggaccagccgtcttccaccgccttcatccctctcatatcaacccgagtgtctcttcggaaaacccgccagcctccagagcggatcgccagcggcgccatcaccaagggcgtggtcctggacagcaccgaggcgctgtgcctcgccatctctaggaactccgagcagatggccagccacagcgcagtgctggaggccggcaaaaacctctacacgttctgcgtgagctatgtggattccatccagcaaatgaggaacaagtttgccttccgagaggccatcaacaaactggagaataatctccgggagcttcagatctgcccggcgacagcaggcagtggtccagcggccactcaggacttcagcaagctcctcagttcggtgaaggaaatcagtgacatagtgcagaggtagcagcagtcaggggtcaggtgtcaggcccgtcggagctgcctgcagcacatgcgggctcgcccatacccgtgacagtggctgacaagggactagtgagtcagcaccttggcccaggagctctgcgccaggcagagctgagggccctgtggagtccagctctactacctacgtttgcaccgcctgccctcccgcaccttcctcctccccgctccgtctctgtcctcgaattttatctgtggagttcctgctccgtggactgcagtcggcatgccaggacccgccagccccgctcccacctagtgccccagactgagctctccaggccaggtgggaacggctgatgtggactgtctttttcatttttttctctctggagcccctcctcccccggctgggcctccttcttccacttctccaagaatggaagcctgaactgaggccttgtgtgtcaggccctctgcctgcactccctggccttgcccgtcgtgtgctgaagacatgtttcaagaaccgcatttcgggaagggcatgcacgggcatgcacacggctggtcactctgccctctgctgctgcccggggtggggtgcactcgccatttcctcacgtgcaggacagctcttgatttgggtggaaaacagggtgctaaagccaaccagcctttgggtcctgggcaggtgggagctgaaaaggatcgaggcatggggcatgtcctttccatctgtccacatccccagagcccagctcttgctctcttgtgacgtgcactgtgaatcctggcaagaaagcttgagtctcaagggtggcaggtcactgtcactgccgacatccctcccccagcagaatggaggcaggggacaagggaggcagtggctagtggggtgaacagctggtgccaaatagccccagactgggcccaggcaggtctgcaagggcccagagtgaaccgtcctttcacacatctgggtgccctgaaagggcccttcccctcccccactcctctaagacaaagtagattcttacaaggccctttcctttggaacaagacagccttcacttttctgagttcttgaagcatttcaaagccctgcctctgtgtagccgccctgagagagaatagagctgccactgggcacctgcgcacaggtgggaggaaagggcctggccagtcctggtcctggctgcactcttgaactgggcgaatgtcttatttaattaccgtgagtgacatagcctcatgttctgtgggggtcatcagggagggttaggaaaaccacaaacggagcccctgaaagcctcacgtatttcacagagcacgcctgccatcttctccccgaggctgccccaggccggagcccagatacgggggctgtgactctgggcagggacccggggtctcctggaccttgacagagcagctaactccgagagcagtgggcaggtggccgcccctgaggcttcacgccgggagaagccaccttcccaccccttcataccgcctcgtgccagcagcctcgcacaggccctagctttacgctcatcacctaaacttgtactttatttttctgatagaaatggtttcctctggatcgttttatgcggttcttacagcacatcacctctttgcccccgacggctgtgacgcagccggagggaggcactagtcaccgacagcggccttgaagacagagcaaagcgcccacccaggtcccccgactgcctgtctccatgaggtactggtcccttccttttgttaacgtgatgtgccactatattttacacgtatctcttggtatgcatcttttatagacgctcttttctaagtggcgtgtgcatagcgtcctgccctgccccctcgggggcctgtggtggctccccctctgcttctcggggtccagtgcattttgtttctgtatatgattctctgtggttttttttgaatccaaatctgtcctctgtagtattttttaaataaatcagtgtttacattagaattcttggcagattgcttcggcctgtgatcctgccctgttgttctgagcctgtgcggtggcggggccgggatgtagtgggttctggtttcccgacggggctggggcccggcatcaggtcttacagagcagaacggtggcaggttgcccccagctgcccagggcctctgcggcctgggtgcccacagccatctttcaggcacttgccctgctatgctcggaccctttctgtacccttggcgcttacctgctggcagcctggccccaccggcatcactgggagtgggctgtgccaccatacaagccacatctgactggcggtatcaggctgtcgcagcgacgtggaagtggggtgaggaggtcacgtcccgtgcttcttgctggctgagggcaaatccctccccacgtgcgcctgttctctctccacctttccgccctaagcccccaggtgcccttactcactcatgttccttgagccaggtgtcttaggtctttgtgtggatgaggaggagcggaggtgtgaggtgtgctgggccttcagggcctgggaaggccatcccagactgagccccaccgccctttcccagctcagtccccaccgagctgacagcttggaaaggggcggttgggaagtgagtagcaccctctgataatgatactgatcaggccagcaggtttgtcaggggtgcacatcctgctcagcagagcatatgaagatcacagcttggtgaagctccactcgagagacctggagcgagactgctgtgcggtgggtgacaggtggaactccagccgggccggggctggtggagcccactgcgagcagtgccaggcacaagattctccccctctcatttcacagggacaaaaccaggctggggcccccaatttccttgccggttgaaccatagctggccaccagatccaccaagcctggggcttctcttgtcctttgaatggctgcttctcccaggtctgaacgaagacataggacaactctggtgacagccacagctggtggccgcttcctcgtgtcagatgtggacggtcaccccgccctcccagcgctaagcgctgagactgcgtgtccagagtcggctcctgcacgtgaggccaattggtcacactgggccagtgtggaggaagacgcctctcatctcccaaatggggatctttcatgggtgtcacctgagcttatagagcttagtttagtctagccattccaagacagtggtttcttaaccttttctaggtcacaaaacctcctgagaacctaatgaaaactggatcccagccccagaaaaatgcacctgtgtgcacacacccagcagtttccaggtcatttcaagtcctgccttcgaggtccattgttattattta

SEQ ID NO: 11 - DNA, 1797 bp, Homo sapiens
ctgtgtactctgtcccctcagtgctttctgcatatgtgttgctcactcatcactatctgcatgttcgtggtctctggaaagaatcaactataatgatcagaataattgcctggtaggacgtatttcctttgagttcagcaagacgtgccccctcacatggtgttcctgttcattcataaggctgtaataatgtatgagttaggagacccttttgaccaattcccctctgttttccatcttggaaaaaccagaactctgttttcttgagcaaatgacgttgccaccagccctgaagctccttttcctgggtttgtaggggttggtggaatcctggcagtctgccgctcttcctggcctccagagatcagggctgtgactttccatctgcagatggcagttctagctgcgaggttggtggccgaggaggacgaggacacagctcagggcctgtccttcaagggcttccgtgtgcagcagcagcactctgtaatatcatagatgaatttttgtcaaaacacagagaaaagttgattacacttctcatttattaaaaaaaaatgacttgatagcatagtagatggccccttatgtaagccacttagtattatttcaaaggaagcatgtctgtgagaaaaggggcaaccacttttctcatagagaagaacaggtttttaaatgaaaagatcaacaaatccaaatgctgtggtatttatactgatttagaaaggcagttgactttgggaggctttgttttctcatttcccttttctccttgacatttgacagacgtggttagcagagagctttctcattcggttttcctggagagagctctgcctcttgggcttcctgcatttgtatggaagttttaattttttttttttttgtcaaatgaaaggttgccatttcatttgttcagatttcccacacactgttgcagcaatctttagatttcaaattggctaattcagtgggtcacttaattcttaacttttacaacattttgagtctaaatacagcaaaattggtgcctttttcagctatttttcggcgttgctatattccaagccactgagctctgttttactctgacattttctcttcacttttgggattctgctcactgtgtttaaggcagctcgatagcattttgccaaaaaagagaagttagggctagtgtgagttgaggggaaggggatgtttctgttgttgctccttgctgagtatcttcagatatctaaaagaaacttgtaacacagcgtcagcctgacactggcctttgcagcatcagccttggttgactgtgttctaatagggatgcctgatctgtatcctctttaacttggctataagaaggttttggagaatgtatgtctgagggtgttttaaaagaaaatggaaacaaagctcctttttgccttgagctcatggtttggaatttgggcatttggaatccttcaagccctcctcctgggcagagctggagtccccttagggcactgcctgtcatcttcactacacagctgtgctccagagcagggagccgatggaaagggggacccagaacattccattctgcagaattcccttccagccgtctgtgagaaggcagtttgggacccttttagaagtttgctttataagtgaagaacctgaggccggctgtgttcatattctcagaacttggtgagaatgaggtactttaagataggctctaagatcagcagcatcagcccactcgggaagagctcctctgactcctggaggagaaagccagatgggggaagcattaagtcc

SEQ ID NO: 12 - DNA, 1707 bp, Homo sapiens
ctgctgtcataagttaatagataatggataaatctaatgaattcagaaagagcaagatgatgttactagctaaaaatctgaaggaggctgtctctgcggaaacatacaggggaaagggattgctgttttttattaccagatttttacaagactatttttagccttttttacaagacttttagtactgcttgagttttaaccatgttatgtatattactttgattaaaaagaaaaattaatttaaaaaaatgagcatactaataccattaattttctccttctagagaaaaatgtttaacagttaggtttagacttgttaattataaaaatatagtagtcttactgtaatgagattttctagaaagcggatttactctaaggcagttcagatttggtccccagctgagaattatagcctggaaataccaacagaaaaatcagtgtcatttgaaggacagtcatctgtgcagcctgtgcatgaaatcatgggtctgaattaggcccccattcaagatgcgggggtgtggggtttgtgttttgctgaagctgtggttgcaaatctttgctttaggatgaaaggtggggctctctgttacatttgaaccttagttgctactcctacctcacagctagtgtttctttctcttcataaaataaattgatttcctggtcccttggaaaacctccagactgctttctggaatcattttcatatagcatgtttgttaatttgagctcttgactgagtcccagtgagatgtaggcaggaacacagacctgatacagaaatagtcctcttttggaaataacaatagctactgtttatcgagcaccttctgtgctttgggcactctccctacatgattcctaatcttcataataaccctgtgagataactactcttatgactacctcccatttttcagatgagaaaattgaggctctgagaggtgaagtcgttgcccatggccccacagtgagtggcagatctgagactcagcgctagcctttgtgacacataactcgtgaccagcaggtagtgctacccgattgaaaaaatgtgagacttaaagggatgcatgtgtccctatacagtggcaaaaactggtatgacagaagtgatgttttaagctatgttatcctttagttggacatacactggacccacagagctagagtacctggcaggctcttgctggacaatgtttgctgaatcagagaaagtgggctttgttggcatttgcatgtgaaatactgtgcacatacctcaagatctttgctgttccccccctaaagctactagctatgctggaaacagtgaaggggtcagccagacctggggtcaccttgtcctggggtcccaagccaggcctcctgtcaggttcatctgtctctgttccacctgcactcacacccagtcttgctgctgagagatggagcatccacatcctgaatcctgcctccttcccttgacacacttctatggtgggtgcctgcccaactttttcttaataggactaaattccaaattaaaaaaaaaattcagtctctctcctctaatcatccaagaagagtcctcttttggtaacttgttctagaactatgcctatcttaaattcagaaattgctttcaaatgaattaaattttagaaatatccattcctgttcgtcctattcccagtgaaaataagcaactcttccctcttc

SEQ ID NO: 13 - DNA, 1915 bp, Homo sapiens
tattgacctagctgtttaattgaaaagaacatctgctgctgtgtaaatcaggtatacatgtacgtgtggatctgctggggaactccttcctgttaatttgtttgtctttccttgcaccagtattacaatgtattactgtagctttaaaataaatcttaatgcctggtagaataaggcctcctgttttgttcttcaatattgtcttggcttgctcctttgtatttccatatacattttagagtgggttttatcagcttccatacccaaacagaaatacccttaaggattttcttctctgattgcactaaatctataggtttctttgatcctagaaatgaataatagaatataaagaattcttattgatgaaagaaagctatttcaggaaacttttttttttctgttaatgataaaggctaaatgattcctgtcaattgtttcaaattttcaactttcaaaatacctgctgcttctttccaattcacctttctctattctttttttttttccaattgtatttttctttgacactcagtacttgtcccttgatagtggagaccatgtttatacattttcatggatcgaacagtatttttttttaacagactagctacttagtgaatacgcagttgaatctacttgtttggcaggttcaggcattgaacaagtactaagtgcctgttctgtatcaggtactgtgtcagtctggggtaagagagccaggaacaacatagccaacaaaaggctctttgtgtctaatttatattcctgaggaccaccactggccatctgcttgggagaatggttatggcttgaataaacagtgtggaatgggtccagggaaccggctgaggaaaggggacatttactcaacctgatcttctttgttaagcagtggagagacccctggtggagccagcagtatcctttatctataatagcttgcttttcatcttttttatatcagtggctgcctgtggcctctcaccaaatctggtggactcattttctctgtgtatttagtttttctcctggaaatgactaacagctgcttaagtccttattcctttctccaggtttctggtgctgccataatttgttctatccacttgggatactgctgtagtgggaatattgtccctgttaccatcttcaggttacaaaccttttccccagcttgtggtaaaatcccgggggtctggtggatcccacgcattttaggatgtatatgggaagctaacattataggcacagtgtttttttttttttcactgtgtccgtctgttcttcagaggagcaaaggctagcatgacctttaagtcctcctttaagagtactgaatttctgccaggagcgtggcttgttcctcaagtgtcgctaggtgaattgttattagcaaggagggatgaaattgcgaaatcttaaaaagtagagaattccttcagatttcattcttgagaggtagaaaacaggaaatagaattgctaaacagagaaggggagtgtttttaatagagatatttgtatgagaataagaggatggagccataatctgaggatgcctgtcttgtttgctctttggcttagttggatcttgggttggtttacttcctgtacaaactgtgagttagtagggactgaatttacagtaatatctaaactgattggaaccttcacttgaacagaattgagttttggcgtgttcacttttaagagaaagaaacaaaggcagccaacccagtatcaagagtttagtcaaaacaaacaactcccagatttgccttggtagtgaatagattcagcatgtttgtactttctatttcttcagtatcatatagtaatttattgtttcattggtgattttgcagcatcctaggttgcaaagaatatctcttgtggatgtgtaaagttaaaaa

SEQ ID NO: 14 - DNA, 22 bp, Homo sapiens
tgctcgtagtaatcgttcgcac

SEQ ID NO: 15 - DNA, 24 bp, Homo sapiens
ttactgttccagggctttagtttc

SEQ ID NO: 16 - DNA, 30 bp, Homo sapiens
ctaaaaccctgtctctaccaaaaatacaaa

SEQ ID NO: 17 - DNA, 22 bp, Homo sapiens
gttcgcacgagaatcgcaagat

SEQ ID NO: 18 - DNA, 22 bp, Homo sapiens
ctagcctgatgaaggaaggaga

SEQ ID NO: 19 - DNA, 25 bp, Homo sapiens
accaccacaagtgaataatttttgt

SEQ ID NO: 20 - DNA, 161 bp, Homo sapiens
ttagggggaaatagtatagcacagtggctcctcatggggactgacctccacaggatgaatgagtgatctcattttctccaatgaaattgtcaagattggaggtgatgaaaaggccctggggtaggtaaccccagctcatgggtccttcctggggtggaatt

SEQ ID NO: 21 - DNA, 357 bp, Homo sapiens
gatctaggatccttacttcagcaacaaacatccctatgctgccttcttgatagactttccatagcaacagttctcaaactttgttttgagatggggtcttgctctgttacccaggctgcagtgcagtggcgtgatcatggctcactgcagcattggcctcccgagctcaagtgaccctcccacctcagccactcaagtagctgggaacacaggtgtgataacacgtctggctaatttcttttgttcttgttgtagagacagggtcttcttatgttgcccaggatgatcttgaactcctgggctcaagcaatccacctgcctttggcctcccaaagtgtgaaattacaggcataagcc

SEQ ID NO: 22 - DNA, 1491 bp, Homo sapiens
gtaccattaaggttcagtagggcggcattcaggtctggtggagtgcatgggtgggtgggtgagtatgggtgggtcggctctggctcaggcagttcccgggtccatgcggagacccccaccccggaccagcccacatttagcctgcaacagcctcccgcagccgtgtgcgcccctcctccatgtggccaccagagggcgccagaggcttgggtttgaggccttgggggccgacaaaggcgggaggaggtggcggcaccaccggggtcctctgttccccatcctggacctgcagggcgtggttctgaggagaacgccccccaagctagtgctatggccgctcgggacttgggggcgtccctgcattcacactcagaagacccaacagggacggactccggggatgccggggagtaggtgctacctggcacagccacctctttcctggggttgacaggcaaggcgtacttctgcgcctcagtgtccctttatgacagtacccaggaaacccccaacagcctctggagacaatttccgagaactgggggtatgagtggagaaccaggaaggctgggagcgaggggaatccaaggccttggaggtgctggtccagccttcaggcatttaccccctgagtaaccacccagcaccaccatcccatgagtatccacccagcactgccccgggcgccatcacgggggacgggccaggtggaggctttcgggtctttgggctcagggaaggtgacagtgaaatgttggggggacaacggattggcctgggatgtgagggggaagggcatcctgtttgctggaaccgcctgagcccagccctgaaggcagaggcggaggcagcctcccttcccagcaccccgtccagacagcacctggtgcagaaattgagccgcactctcccctcccatgccctgctgccagccccacccctgcccacccagagagctgcaccgaagctggggtggcccttgcggggctcctctctccccctagttttggaagaggggcctggaaatatgattctgagactctagccggggagcgagagttttgtaaatggcaccatctgtatgggtgccccagggcagatgggagaccccaggccccccagtcccagtgggaccgtgtttacatgcatgtttacacacgtgtgcacaaatatcagcatgcggacactcgtgtgtgagacactacatcctccttctccccggaaagctgccaggagctgccctggtgctggggtcttggggttcagagggggaaggattagactggcctccttggctcttgcctgagacgagggcagagtttgaaccaaggaagcgtttgtttggcctcttcgagggtctctggctcctgaacagatgggtgtccgcatggcagcatctggatgggcagacagcagcccagccgtgcctggctggtgaggcacaagccgtctttgtgttggggaaacatgaagctgtgggggaaaatagct

SEQ ID NO: 23 - DNA, 1762 bp, Homo sapiens
tccctctcaccctcacaacagcatcctctctggggacatgctggagacccccatgggcccctcccaggagaggccagctctgcagcttacaggccaggggaagcccacagctcggccctcccggctctgaccccttgtcctatgtccaggtcattgctccctggaggatgcctgaattctacaaccggttcaagggccgcaatgacctgatggagtacgcaaaggtatggccgagtctccccaccacccccaacctttccctatagcccccttcccgggcacgtccctgctgggggctgtctgagccagtggcctaggccgggactgaccccatgtgatgggggattgaacttccaccccagctgcctacacacgtggcctctgtcccctgggctgaccccacagaggtgtggtcatctgccagcccgttgccagggcggagccgctctgaggccatttcccagtcccccgagccagaggacacagggctcactctctctcctgctccctgggaggcggagaccagagccctgcttgccacctccgcagtgtgtgtgtcttggtgtgtgtcacttggggggatggctgggggatgtgatggccggccggggggatgtgatcgggagctgttctcccaattccctggatactaattgcccctagcgctttccccgggaacaggtaggcgctccaagggacagtcgcagacaaagccttttatggcaccagccctttttgaagtacaagttgcaataaaacatattagaagttttgcatcaagatccttagccgctccccagggcacctttctttttagcgactcgatggcagcccttgacaaacagcctcaatcaatcaggccggggaaaagcaactcagcgcacacaccagaaaattgctcaggtttttaaatagcagtcgccaaggctggctgtgagctctcgctgcagccaaggtgccgcgtggtaggggaggcggcagggacgcagccctgcccccgccgccagcaacccattaagacctggagtgctgggagggaagaccttctccaccatctgttgttttattattaagaggggagtttacaagagcaagcccatatgttgccaaacaaattgtcaaatagcagagctattaagggagccgggttggtgaggtttctcccctggtctccttgatgatatagaatatgaagcgtgtttcatctttaagaataatgaattggagcccccacccagctctaccctcacgcctcgagtcctggatagagaggggcagggccgacccatacgttgccctttctttccgttaagtccccagacaaaagcagcttctggtttttctagcatagatgagtctcaggagcacactgctgtccttccttctcaggttttgaggagaaggtgctgagctcagcttccatcccaaataaccttttgagccggaaaagtttgccagggaaagatgagcatggccccctcggccacctaccctctcctggagatgggtttcatcagaaatgactgtggggaatctgagcacgttctagaaggaggcagaggcagtgtttctgcacccaggaaatgtcagaatgactgagcagtgatgaggcctcctccaaaattctgagccaggcaggatctgagatggatgacacaaaaatcaatggggctttcaaaaatctctgctttcaagacgcttcggtagccaaggcaaaaaggcgccagaggactcataaaaaacatgcatttgcttcgctggc

SEQ ID NO: 24 - DNA, 1727 bp, Homo sapiens
cgtggatgagagtgacctgcaccaagggacgaggtgtcacctccagaggtcacctggccaaactagagatggggcaggcccctgtgggacagacagcccccactagacgtgggtcccctaaggcccagcttagctcaggctaaggccagcccctccctcctggaggctggttgggaattaaagtacgagtcttgtttggcagtcaatattatttttttctttcccttctccttgccatgttgagtttctccccgcttcaatctttctaaacactttataagccataaatacaactgagtcagtttagatcagttggggtaaatgtcaaattatcttctctctttctctctctggctctttcttccctccccctccaaatcaacagcctctaataatctgtccaacccttcattaagccttacagtctcactcagggagattaaatgaataaagtaaaaagggaaaggggaaaaaagagagaaaagcaggagcatttattctcactgtgtctccgaccatttcccttttctttttgatttctacatcgctgacttgaaagcccttgagtgacagcgtcacagggaccagcgaggaagccgtgagaggtagcagagctggaaatgccgtggctcagtaggtagaaagtaacgtaattatagagcaggtcagagccactcgaatgagcaaaaataaaagcacagaggttttctgtagaccgtcaggggaggtaaaaaaaaaaaaagaaaaaaatcattgtaaactctttttccacctccccgctcacttcaaaccacaattttaaaaagaggttttttagttcctgagaaacccctcttggaactcccagcagcctcgtgggacaagtttgtccctggatgtgggccctctttgcaggggctgccagggcagctgggaagttcccaccttggggaacgggatggggagagtttgttgtgacttgtgagagatggaggtgaagggacagatggacacagaggtggggggattctgtgtcctacgttctccctgggctgagtataggggccagtggggctgaggctcggtttctaaaacaaggtctgttgaagggatctgaggaggttggtggtctagtttggtctagctcttcctaagcactgactgcacagaaaggggtggccagcaaaagtctggtatctcctcctcttccagggaatgcaagctcctagtggcttcagtgcctgagccctggaggggccgtggaggtgtggaggagggaggaagggacatcaaggaggtacaggagcatgggagtgactctgcagagagttccacgcacccaccggcttcaaggcctggtgaaggtcagggcccgggtcctgaacaaatcactggggccaggcagatgcagagacctcatttgttcttgtaaaaagtccactgtctacaaagaaccagtcagagggccagcctcagggtctcaaagcagcagatcctcctgcctcccaacaccgacccccgctacccctacctcgagaaccttgagtcagctttgtcccaaggctggaattctgcagacaagggtctgattcagagcaggacatgacaagggaccccatcctctcagaggctcagaggctggccttgtggagtaggaggcatctgagtccacgtgccctaagtgcttagcacaaccataattaatgaaggcaatgggtgattgattgcttcggtctggcccctccctg

SEQ ID NO: 25 - DNA, 1497 bp, Homo sapiens
cccgtgaggaatcatcgcaaccaaaccagcttcccttctggccccgcactgaagccatgtgagctttctggaacacaattgcatgttattcctccctctcttgcctgagctgaaagcttcctggggctctttaaagtgtgacgctggtccctggccacctctggagccctgtccccacctgtctggactccctttggattttgtccctcagctagactgacccatttgcagtccctcaaaagctctgccacctgcaaaccgggccacctgggcccaggctgagcccagtcttccccaccatcaaagtctgcacccgcaaggacagaacatgcagcgcgtacggtgcacactgtaaagtgcggtgcccccgctacatgacgacaagggagagcagatcaaacccagcctggctgcagctggcgaacgctaagaatccagccgctcagaccgtggtctctcacttccctggcatgcccttcactgcctcctcccgccccgtcctcactgtccccactgtccccaggggaggcaggtccaccctcagatttaccagggcatgttaagacacagtttgaagccatctccgaggtcatgaggtcatggcagtttcccatcgatctatttgtccctcccttgcctgacgccctttgcccccatgggcccccagagccatatcaaacttcagcagtttctcccaaggtccaaggagccaaaacacagggcagggccttaaaacacagccagcgggcgatttaccagctgggctgcccaacccctgacctccggaggagatgtaatgcatctccctggtttagccggatcaatggtgctgtgaaaaacagccccatgtgggccagttgggacaggagggagacacccctgccgccagaaatcccacccggacagccgcggagtcagcctccgtgcacacgcacggccccaggacctcgctgggctcgccgactgtctcaggcaggagctgggattgctgagaccagcccctagaattcggatggggaaactgaggctggggggcttctcaaggtcacagagtaagttcaaggaagcctccagtttccccagggggaactctccctgctcagcttcggccttctcctgtgggcgaaggtggcagtggccagccagtctggtggggcagtcgtggtattgggggtatcataggtccctggaaggccaagcttggctgtcccacagcctctgggcaggaccagtggacccagtgtgcctccaaggtgggacttcctgcctttgactctgtgtggggcagaaactccaccttcaacagagtgtcctgcctgagtcacaacatcccaacgagggcagaggccagaggcagcaagccaccccatgctgggacccccttgctccccagaaagcacagtagcccatatttagggaggaaggttaacaagagcaggagggctctgcttccaaattctcctcggtcctcgtgtgaccctctacccctagcctgag

SEQ ID NO: 26 - DNA, 2169 bp, Homo sapiens
tgaagtcgctgggaaagggtttgcttagagcgtctggccccatcgtgccccagcggccagcctggacccacagtgtagctagcgcggggttctgaacctcgcgaggggaggggtccgggaagcccacggggaggatctgggtgtagacataaagcagctgtctgacgcccagtagcttgttaaaacttggggaacatcgtctttagactttctgttgagtagaaggaactcgagggcatcttatatgtgagggtgctctttggagaggtgagagagggaggtgttacatgtgtgggggtggtccccaagatgtagaaatttctcatggcaagcttgcctctactggggagaatgatatggcctcattccgacattgaaactttactgtctgacaatgtcgtgcatttaatcaaagttaaattaactgggttttagaaggctccaggcttccccagagagtgaatatgggacctgccaaaaatacttactggcttctggcatggtacttagaacagaacgtgttcttcatttgtatctaaaacttacttacaagtcagccctaacacttcagcttcctcggttaagtgtcttatgtcctcctctcttcttatgtaattgtaagcgcactgatactttaaaagttgggctataactaattactgcttgattcctaacagaaagccacaggagtcattgtattagaagaaggtcttcactcgggcgcttgaagatatggtctttacatctctttccagtattccaggggagggaaccctacctgtttccctgataactgacttttcatgttatatattgatgctcctatagacattatattggatcccagaactttccaaacctgtggttccacctaaaattttatctgatgaattgttactttactgcctagctgccaaccagtacagtagtgagtatccatcttacttagacttcagatccacccatggctgtaatggatgaacatgccacccagctccccttccaccactctgcttgctggcgtgttacagtgctctcctctacagtacagggtcctgaaccttgtttctcactggctactaatatgtaatggctttcgctctgtgctgatgtgtgacagtcaccttgttggccttctatgtccgggaagaattatagtcactgccctaaagggctcagatcctcagtttgcagaaggcctgtagttgaacataaagtgaattttgaaccattgagaagacattccgcttctcttgagccagtggttgaactcatattcttggacaacctgctccagagggagaccctctggtaaatgctgacctaatgtggattgttgaagcagtggtgtttactactagcagtgaaaacttcattggaattgttctcagctctgaaatgcaccattgactggagcagtaataagcccaatggagacagggctgtaagtgtgttccttctgaatgttaacagctggaggtccatactatctccaaggatttgatggcctttaaaaactaaagaaaaaccaggttggtgggtaattttaggtttattgtatatagatttgcattgggcaagaacggaatgttagaaatctgtaatactgtatgctgatggtaaacttactgtaaggatctcatttgggtatctggaaggtgatagttctgtttctttgttatatacacagcatgttacagagatgtgatttttctccccattaaacagaactaaaagacagtatatttatttaaacgcaaagctttttccccttttatgtctcctcataaactccagagacagtctggaaggccctcttaaatttgtcaaagagcagtaaagtgtctcacgctcagtttttctagcagatcgtaatactctcagttgaccctgctgggatttgaacctgcagtttctattaagtttggtgtgtgaagtccaacaccttatcaactaggctttccctctgacatcttgaagcctccgtgtatatcctttggactctgcagcaaagtgcatcagttgttagtttactctgagcatggtattcttagattgaaaagaagtctctgaagatgtcaaataaaatgtaaacattttctccagcagtgtgaagtctagtgagttaatgtttggcacaagcaggtaatttacatccattctataggg

SEQ ID NO: 27 - DNA, 1500 bp, Homo sapiens
tttaaatagacccaaataacacctccaaaaagttctagaggactgaactttaacctcgtaaaggttaaccctgcttcaagggaaagttagaaagttcatgttgctaaagaagtgatctggtagcctctgtcaaagaaaacccaagccaaaccaaacaaacagctacacagcctttggaaatctttattgctaagaaaaatgtgccagaattccggccgcttggtctgcctctgcttttctaaacttttcatcacgccatcagcaagactgtgagcctagaaggtggccaggtaaacatgaacatcacttcccttcacaggatctgcttattcacattctttgtctcttaagagagtggcccagtgaccttacccctaccagaagacaactgacaaaaaggggctgtggcagtccccagacgctgagatcaacacagaactcaaattctacacgtggagaacagcttggagaaaaaaacaatatgtgtaatcctgttatttaaacagtgctcaacagaagacacgattaattttatcgagctgtaatacagaatgtaagaagcctgagggaaattccttgttcttcaaatacagcctgttgttacctaagaccgggtgttcagggaggatgagagattcagcacgacacagaaactttccttcttgctataggagggcttcatatttagagggaagaaaaagataaaccatggtcattttctgtttgtgaagacttattccccaaaaggtagacatggaaaaaaatatggttatcaaaacaagtaagtgaaaatacgcaatataaatgaacccgaggttttaagtgagattctggacctactgggtgatctttggccaagtcagctaacatctgcctgtgacccagttctctttatcaatactgataatctctttattagtgctaatttctttcaaatgtatgtgcaatggactaatgggagaaaaatgtctgcaaaatgctagagggtttcatttgcaaatatttaggtattccttatgcagaggacgcagcagatacctgctcactgcaagcacaagttttaacccttcagcgccaggcagtgggtgaaaaaaacaaggctgaattgtgaaattgttgtgaaaggctgaatgagttgtgaaatatattgatctcaatttctggaaacactgggccaaagagacactgtccgttagtgaggtgtgtgcacagaggcagacaacttagttttgtttttacgttgctgtctcaagaggaaccaaagtatgattgcctcgaaaaggtaaagaggttactttgcattacagctttctgctaaggcaaaaatgcagttaatgcaatcatccctatttggcctagggaatcactaacaccagtcaaatataaaaagatcacagcgtactattttggataagtagtttaaatggttatcttagttccagtggccctggggtggattttctgttttgtggtcataaacactttgtaaatacacacgaa

SEQ ID NO: 28 - DNA, 4158 bp, Homo sapiens
aaacaggactgattttacccagcatttttccttttttacaggaaaatgagtgtagttccattcaattgaatatgataggtgttcccatctgcctccttagtgtgacccctcctcattgcgaagactgaggagaggttcctgttcctggagttggacatagaagttggccatatgagtacccagcgcccctgatctaactgctggttttcatttttaggcagcaaatgggaatgttccgaagggaatgaaactgcaatcacatgtttcagccttgggtggactccagcatttgcatggaggagggagatgatttatccttcctaagcatctgccagctcagagttgactctggacttgaacctgatttcctctcagtgatgcggctctcagcagcccatctatctgtgggatgatagtgtgaacattttcatctctggtcattatgagtgcctccaccgtggctggcaggaatggtgtcatgtgcgtggcacctgtaacacatactttgccaacaaaaaggaattgccatttttgtgatgagcacaaaatttcaaatggcttttgaacaggagccctctgaatattcttgtgaatctcaggaagttctttatggtagcactgccctttgtttctgtggcttttctggctgagacagaaatttctgaagatcatcggccctttgacatcctttaccaaacaacgcagtggaccagaacccacggtgcggcctcattcccccagctgaggaatgctgagcacctctcctctgtgttctcatcatttcaagacattttagttcttctggcttcagtagattctttacccactaagaggggaattctgatagcaatcagggaagctgagcttgacccataaataggaacagctaaccaagctcacaggtactctgtcgttgacattctcctttggtgtgtttcttttcctccccactgccctatgtggccaacatacctccctcaggaatgtctcagccccaacattattcaggggctgagtctgtggtgaggatttctttcctgacctggtgattgtccagttttcatgcagaatgggagttgtgaacactacctgttccaagcaagaatgtttgttatattcaaacagataggcaaagagaaaattttaagagtcagtaaaaaacaattctcttatccctgagataagcagattaatagtgtctagtgtcaatattttggctgtagaccattatcttgttattgatccagaagaaatatggtattgacttagtagcttcgtttgctttttgctagcattgttttgctttgctttttcttctttttaaatgtcacggtctgctttttttcctttgtctctttactgtccagtcggagaatgacagcagtgagtttgagcacaagcagagcagttggctccctgttctgattcagatggagttcaattgtcaaaccatttcattctctgtcctcaagtgggtgtaatcgatcctttgcgacttagctcatgtccttagaataactttccccaaagacgtatttctgaatgccctttttagcatgttgtaaggtgcatttggttctttgtgatatgtttaggatttgtattttttcattgtctgctgactgtgtttcctgagctgcattttccaaaagagaaacactacagaatcatttttgctgatggctggtgaaggagagacactcatcaatagctgaaagaggagaaactggaacaaaaagtgtagctaaagtggttttgtgggaatgtgattacagagttggttttaataataagaggctgtttggcaccgttgtctttgtgaaatgggcttgaaaggcagttgctcattcttagtgtccgctgcacatggactgctctggtgggtccgtgacgaggcctgtggaggtaggaggctggatcctctccttcagatgcttatggtcttgggggtgggggggccggcgaggggggcaccagggggcgtctcctcccccgtggccaggaggagcatatgtgcgtgttcctcatgactacagctgctgtggagcagtccttaacaatgcatccaaggagggtaaatcttctcatttgtttttaaaagagaaagaaggatctctttccatctttacattgagtttggatccagagcaggagggaggtaggaagttagagggatttaggctagcaggattttctcccaggcctcacagcatgtggacacacagatcaatttcttatcctgtgttcagctggacactgggttacagactgtgttgatcaagatgtcccctcctgtttcatatcatataacgcattcatttcagccactgagcctaaattactgtttgctttctttctgcctttcttttccaccccacccgaaatggtaagaatggtaaggatgaagttagtttatccgtgctaatgctttgattttttttttctctttctctttgccacagtaggtaaccagttaggggccttggtacatcaaaggtaagcagtgggttacgttttattatttattgatcatttctaattgtttattgatccaccatctgtactagagtgctagaaagtcagaggttgagaatgtgaaaaagcatgggttaggcttctttaagactcgagttttttgctagccatttctaagatagtgtcagctcagggataaactaatacaaggcattaaaaatcagccattattgcagtaacttaaaatacttgtagaagattggagttgctctttctaccaatgtacatttaatttaaaaggagagaatgagattttcccacctggttttgtggtgttgccagtattttattaatccttaaccccttcacctgagaagagacacctcgaagtgtgagggtcagacactcacaagagaatgctttgggtgcccagggagtatgggtgggtggctagtgcgtggtgaggaggccagaagccagggttccatccttccgaagtggtagggacttgccagagagcctcagcccagctaattctctgtttctgtgtcccctcatagccttctgtcaaacgtagaagatttagagagatacagaaagagccctgagttttacaaaggccaatctgtaagatggggtatgtgtggtcatagtgtatcgcccttcaaacagggaaaaatatacaagaaactgccacagtttctcttctggaaggatgaattttgtgctatgtatctgttgctgtaacatatccttaaccttctatcagcaaaacaattctgtcatcttgtattctgcctaggtgtttgggagtttctagaaatcaccggtcatcagttaaacaaaagttttatcctggggtttttttggtggttgttgttattgttgtttctttgtttgctttgttttgtttgttgatgaactgaaaaatttaaatgaggtgatcgttagtatcaaatgctgactttcctataaagccataactagtcaggattttcttttccaaggtgtttatattttgtaccttggacaagtttcagccttgcatttagattagaacgttttcttcctggaaacccagagcagttcgtcttggaatgtttcttcctcacagttggctaaagtgttccttagggccaagggctgcctgggcttcgtgacattttgtattgcagtagtgttgaagcccctctagtcaattcccaggtaatattttctgagagtagacagaatagacagctcatgctacacatggtgtgagcagcagcctcctggccacacgcacaagagccctgtcatccctcataacaaggtcaggaagcacatcctgacagggacctggcttctgctgcaggacgtgttgggacagcagggcttggcattcacatccatggtgttactgattaggaagctgggaatgaattgcctgatttggggagaacacatacatcgcaagaggtggagagaatcccgtcttgttcataagcttgagggtgtaaactccctcaaggagggagggagaagactgtttgttcccatcaaaatgatacagtggcaagtgctatttatgctattgcatttcttttaagtgatgcactttccctaaaaatatgcacttattcaatcctttctgtgatgggtaaaaacccagctgtgtgagagatgtttaaaaatgcttgcctt

SEQ ID NO: 29 - DNA, 3840 bp, Homo sapiens
ctccacaatagaagtctaaacatctcccaaaaccctggaggacctttcagtgacctgggattgatggcccattggttagagagcacctaaccaggcagaatgaggcaacactgagaggtgctgtatgaagaaaaggcagctgttagaggaggtgatggtttcatgaaaaccctgaggtttcttcctctgacaaaaggagatgaaaggcttagatctttggaaggagtgattgaccagacggttcattacgtgacactctttgtaggtggtggtggatttgttggccaaattggcctgatgtattttaagcttttatcatgcaacattgccagtatgggcagtttggggacctaaaatggctgcaaaagtctgtattctgtatttttttccaaaatgttctttgtttttaggacggtaataacggaagaattcaaagtgcctgacaaaatggttggatttagtaagtatccatgttgtctactttttccctgattcctgtctcttctttttctctctttttttctgagctgctttgccaggatgttctttttgttttaatctctcttgtgagtatcacctgtagtagaatgctttgcacatgccattccccacagctctgaaatgctgcaggtctcttcaggctgagggagaaaccagagcactggactgtggatgtccctcccttccccacctctccccacctcagctcagatcccctctgcctgtaggctgtttcacaagggctttctgctgccatcatgcccaaagagtggagatgggctcacgggggccaactcgatgtgtagtattgtgagccaagtgtcacagtttgtggaattaattcagtcattcctgcgtggtgaaatatggaataggggcgtgtattctgaccctgttcaatttgtttcagttatcggcaggggaggtgagcagatttcacggattcaagcagaatctggttgcaaaattcagattgcttcaggtaagggctttttaaaaatagatatcaattttgtagaaatcagtattttgcaaaactttccagattcggtactttgcttgttgcttgggtaagtatatgcgattagtgttttccttgcactttgggagttggactcctaaatgagaaccagaaggatcagagcaaaggtgggcccggagataaggcctcctatctggcttctggggtaaaccctccctcagctctgtggccagacatggccccttcccaaacacctgccactctaggacctatgttttctgcaccagaatgttatgccagacatagtggcatagtggggcctgtaggaatcctatggctttggggtcactccttgactacatgcatcaggggaggctcccatggatgagactgtcccttccctttgtgggaagaggatagctgggggtcctggctgaattagcactcactgaacatgttttatgacctttcctagctgggtccattttgaccatgcaacatggagagagatggagtgaagaacaattttttattttatttatggttttgtcatctaatttgagcttgacctctttccattgcaaaggaaggggtttgaaggacatttgactagaaaaatgtccttttaaaagatacttattacagtgtcttgaaggcagtaagtcctgttagctatttctctttcattttttttgaggaaggattttaagaagcaaattttttcaggaacaaaatgaggcatcacatgtggtgttagaaagtaacgtgtttctctcattaaatggcccagttccacatagatgtcactgatctcttgggacattcatgcagtaactggtatggtcctgatgtgcgtgtcatgaagttccttcctagagtactagtttacttgccgtgtgcagacaaatgaccattaaactacaaatggagaaactgaggaatagcacgataaagtgactgaaacaattactagcatgtgagtgggtcagaagtgaagctgagatgggtaatcaggaccaactcacagacctctgtcacgtccttctagcttcccctgtgggacttgtttctacttcgagaatctagggtggagctaccagcttaatattctgtccacaagtggaagcaaactgtctttttctgggagcctgggcctctgcagggctggcgtaggaagcagccctagagagccttacagaggcagaggtgcatgtgcccggtgcccaccaacacccctcatcttcttgattcttcttatagagagttctgggattccagagaggccctgtgtacttaccggaaccccagaaagtattgagtaagtttattttatttactttttctttcactcttcttcctccttccccaaatggggagaaatggaagggcaacactgttactgaacactgagtctgtgctgcagtctggccacacaggtagataattccataggaaaaaaatctgggaggttactgtgccaggggtttttgttaccttaaatacacgagatatcacatttgttctaaaccccacagctgtcataacatctacttcaaaccagggtctcaggagtgtacattcaccccacctgaatgctctaatcaacttacttcttccttgttaacacctcctttacctgagcaggtctggattagtaagccagtcacttggtgagctactgagaatcctggtaccaggacttttggctggaggctgatcccgttacccttctgatatttgtgaaccaaatgaatcaactcttcgtgactttgctctactcagagggccgtacggactggccagaggatgtcttgacttttggcgcccttgcaacagtcttaagactaacattgctttcctaccctgttactcacatactcagaaccttataccaggtgcaggtgtcataaatccaagaatctcctgggaaagggaaacatactgacttagagcctgctcactgtccttcaatctacggagcagcactgcatttggggacaggggtgctaagattatatctgactcaataggtagggttgttttattgtttccatttctcagggagtctagatgagcttaaagtctcttgttctgccatcacattgcaagcagtgaaccataataaatatcgctggcaggtgtgcattacagggcaactggatggtttgctggagtcaaagcatttttcttccaacacaggttaatctagtacacaggcaaaatattaaaaagctgctgtaactgggaagatacacgaagctgattctgtacacaaaggctcaagactacaaaaggcaacatctatttcctgcctttctcttctttcttcctactcttctaaccattcctgcttcctgtctacccaaggagcagaggcagtgggattataactttaggaggaaacaaatttcattgtcttcagtgagcagcacagctagcctgtttagtagctgaattcttctccattagagaaaccaaaaagcagattgtgtgtggcaatttagagaatcaatacgagaaataacaaccaggagaaattctggtgcagaaaaggaaattggcacagcagatgactttggtggtctgggctgtgctgtcacaacattgcagttgccctctcccgctgcccaagaaaccaacacaaatagcaggacacgtgacacgcagggtcccaacttggctgccatggaaagcccaaagcaggtgtctgtgagtgcacagctgcatccagcaccgcctccccctttcccacctcttggaaccaaactgggattcatagccttagcttaaaagtcatagagcagtgttgttggttatgaagaagaagcgtggagtatgggagttcagacagtgagtac

SEQ ID NO: 30 - DNA, 2564 bp, Homo sapiens
tcaacatgagcaggttttgcccaacatttcttcatgtgttgaaaagtctgtgcagcttctcccttccatgaaatagctcttagcttgaccaggttcaccctccacatttaagagagtttaaatactgcagctccaaaatgactccgcggacagcggctggaatgagacttgctgctgtctcaatgaaagggctcttcctctgtccgctgttagatttaggtttttctctctgctgggtgaacagtgggagaatgcctcagagacttctccagccccacatggggaggaggccttggcaggttccctctgttcctcccttctgaagtatccctgaatggtcactcttgaacctgttactgctgctgctgcttgggggcacaacagccaagaagttttctaaaactgagtaaaatccgtttatccttcttgctgactggagtgccaggtgttgtgactcatagcagtgcctggttggggagggtcagcaggctgtgcatatctgacttcccataggcccagtatgtgtccgccgcaggaaagaggggcctcagctgcaagggagaaagcagttcttgatgcctgtagatcggggcccagtgaggaaagctccagggagaaaggccgctgggcttcagccttggagtttgtgtctgcctatttctgttggatacatttgagctgtttatgtaaccacgtgtgttcgtctgcacaggtcctccccagatacacctgtgatcggtgttaattctggcttgaaagagcccttcagaatgggaagtgtggaaaggtgctaggttctgatgggtggcattgattacatcctgtcacttaacctcctccctggaaaagagaggagcagtggtgctgtggcagtggcagaggtcgctacagccctgtgatctttccaggaaagagacggctttggaggcctggcagcagccagaggaagaggtcgtggccgtggcgactggagcgtgggagcccctggtggcgtccaggagataacatacacggtgccagccgataagtgtggcctcgtcataggcaaaggtaagaggcagctggggtttcacatcccccctcagctgtttggcttgagggaaggcaggtcacgggacctccagaacctttggtgaggtccctttgctgctgcaggctggggctgcccggtctggaggcagtagccaccttctgccgaaaccctgcttggcatggttctctgaggctgctgacgggcctgttgtgaggagcaaagtgtattatttctggtgagtatgaagagacagcagtaaaactccctgcctgttgagggcagcttagcttggtgaaaagataccttgcgcaagatggggggcatttgtcaatcgactgattggtaattaactcacctccaaggaacttagagggacggttgagacagtatcctcagtgaaaattccttctcgacagtgtgtcacttgtttcccttaccaggtttgagtatttggtcttgatccgcgtaacatgtgaaaatggtttttatcctttctgcatatttaccgtgagtcacggactctctgtggagggaaataaacattgatgtgttagttttttctgggcattttggagaacattaggaagaaaccctcattcatggctactgtagctccttcctgtccttcactgagaaccaggagagagcagccacatttctcagccattggcagcagttcatcttggctagccctgggacccagaaaggctactgagaccagggccgaggctgtggggccttcccagtgtagcagcagggctcggcttccgtggggctctgagccaggcctcgctgccagcgggggactcccgttgtcactgggtttcgtatttgccttcattaggtatttgacagcatgtggagaaaacagtcgtctctccagagtttctcaaatttctttgatcaccaaataccccttagctgcttgaggggcgctcgtattggataggcaggacttggggatgcttcaccagcagagacctccagagctgggcaggtgggagccccccgacactcacctcccaggagctgccctcgtccctgctcacagacactgtgggcttatgctcttgcaaaatgcaagaaaccgtgttgtcttttagactgaaccactcagagttggtatgggttcgtgttcatttgccggcaggtgtgcgggctggtgagtgtttggggatattgcaggctgcaccagatgctgccagaagtcccacactacccaggccgtcagcctgaccgctgtgagactgcagctagttgatgcctgtaggttgacgattagctagatctagatttcttggccttttgcaaactattttgtcggcgaagttttcatttgcttgtgtctctaaaccctgactgagcattgttgcctcaccatgacaggttctcatagtgagcccttggtgctcacagagcagcccctcgtagttggtcctccacaaagtcatcctgagtgattcctagaaaacagtgatgagaacgaagcagtaactggtctgtgtcccatgcttgaatagcagcctaaaga

SEQ ID NO: 31 - DNA, 3903 bp, Homo sapiens
attctttattgctccccaaaaaacattgcctaggagcctgcttttcatggtgcagagaagataaaatccatggcctccgagtaaagggcagaggtaaaggtcccctaggaggggcttgtaccggcccagaggaaatcagagctgtgggtgctggcccggtgtccccagacaggcgggtctggccagggtggaaaatgcagggatgcttctctgaaactccagcgggaccttaaggaaatcacaagcacaacatttggttttgttagttgttttttaaatttaaaaccaccctaaacttaaccaacgtcttctgcatgcgaccttatctgcatgccatgtctcccggcgtcttttctcccccgtaagggcagcccctgctgccttcaggaaggaccacctgcctttttcattcctggacctctgtagagtccttgcaagacgcccttgtgtctgcctttagcgtcccctccctactggcccgataggctgttgaggcagggcttttctggcagtgggtagagagaagcttggagtgtttggaggattgtggacggtgtcttggtgaggtgccacatggcatttagggcctgtttttttgactgtgggcatggaggaggggccgacactggccccggtctttgcttttgatcacccaggctcgctgctgccctataccagctttggagcagattacctttttctccacttttccaaactgtgctccaagttatccttgtattctggctcctcctagcaacactccatcccccacagagttgagcagagcagatccgcaagttctgtgaatttcagaagaagaatccaactattgttacgctgctggagcttttattacgcaaatttcattaagagactgagactctccgcaggtttttgaaagagaccaactgaatttttgttagcccggctccacccaggtctttgtgacctccaccccatccttgcactgcctgtgtagaccgtcaccccatggaggaggcagggacttgagaagtgacagggtgggatactgaaggcccgagtgggctccaggcatggttgggcctgtggtcatctgtttggcctatggagaaagttgcccacagccaggctgaaggccccattgtcatggaggcgcccttggctcaccattcttgtgctaagaagggcagtgccatccctggctgggcgggagccccacagctggcccccaagggtgagctccatggtgtagacccacaggcctcagcccagacctggtctctgggccactcacgaccttcacatggaggtttcacatggcatctgtggcctcagcttggccttgagagaaagtccagcttcactccaaacagctagttttgcaagtgagagagccctgggtttagttggaaccactttggagtaaatagagacaacttctctactgtcagggcaagtgccgacgtgcacaaaatccccccgagttgtcttctggagccaagtgccccagagcctcaggagttgccgcagtctctgcttactcttctgcctgtgttgtgctgtccgcagggggtgagaacatcaaaagcatcaaccagcagtcaggggcgcacgtggagcttcagaggaacccccctcccaacagcgaccccaacctgcggagattcaccatcaggggggttccccagcagatcgaggtggccaggcagctcatagatgagaaagttggcgtacgtacagggtccttcccccacctggtttactcatagctgttttcttgtggatgtccaaggtaccagcttttcccaccaccttgtgctgcttgtgcctgtgggttctcacatcacacgagggcaagccccctcctgctttgccgaaggggagggtcggagacccagggagtgccagagccaggcccagaagcaatgaaggaagcctggcaggactcaccaaggccgcagcagccgaggccccagagccgttcccctgcgggcttagatgagcggctggggcggcagcctccccccacgctgccccgggactccgctggcattgccctggcggccagcccagcaggcagctttcattgactctggctttagtttcaggcacctcaaggcagataaagaaagggagtgttgatggaggacagatgggccactgctcacctcaatggggacgtagaatggcagaaagagccttgggccagcctaagttgacgggagagtcaagcaggttggtccctacccccagggtgatgccagggcagttgtggtggtgccaggactggctgtgtggtggtattggtcgctggagggcagaagccatttctgcagcgcagcctgctgtgggaaggaaggctagtgtgagtgcgtaggtgtccttacttcactcgactccatctccccaaaagctgggctttgcctcggggtgggcctgggcagaggaaagaggtgtgcaaccaacagcgggtgagagctccctctgtgcccccacaggggaccaatctcggagcacctggagccttcggacagagtccattcagccagccacctgccccacctcatcaaaagtgagtcttttgcatcagtcttgcctgggagaattcactcgctccccagagatcccctgtcgtttccagctacttctagcgagtgccagccaaggcctgaagttctgggcgtgggcaggactcgtttcttttcctctcaccagcggtccctccggcctatcactcactgacctcagcgatggggtgggagcctctcagagggcagagggtcttctgtcccgactgccccctcagtgccctggggctgcggggaggggacgagccctctgttgtgaggcgctcagtctgttgtttcttttaccttttcccagtacctttcctccaaggagctccgggtgcttcccaaacatggctgccaaggtgaatgggaacccccacagcacccctgtgaggtaggtgacctgctgtgactcagttggggacagacggcactaaggtggtcacttggctattgccgacaggcaagggtccggtgatgcttggctggggtgagggaggtgagcagtgaagagggagacgacaggggtgacttgccccctataggaacgagtgaccctcttgttatccacagtggtcctccggcctttctgacccagggctggggcagcacctaccaggcgtggcagcagcccacacagcaggtcccaagtaagtgactcggggcggggagtgcatgccctccagaaaggttgcggcccacagaagtcctggggccaaaacgccctcgttcaactcagccagcaggcccaggatgcccctccccaaatgacaaggagccctctgggtggggcttgggccctcctgcaggcctgtaccaggggttgtgcatgctcagaaaaaggccccaagggaaactgcacaaacctcaggcgggctggggactctgggctggccctctcttggcccacctgtcctcagagttctgggcctctgtcactttcgttccctatgcatgggtggggatgggttgagccagcttctgctcctcctcttctccaccccttgaggggctggttcctggccctccaactccctgcccctgccttgggtggctgccttcctctcccctctcaggcttccatctcctgaacttttcagaagcaaacagctagggaatgacttcttctgcatcccgcctctccagggaggctggttgtgaaggagaaagtcctggtgggaatcaaagccgccaccctctctgtccccacagacgcttcaggaaccactgttgggtttcagagctggtctagcccctctggcatggccttcacaaagcaaagcagaacccttaccttagtacgatccacgttcttttgacccatctggagtttctgtcctgtgtttagaaa

SEQ ID NO: 32 - DNA, 3507 bp, Homo sapiens
tcccaccatccatcccctttccctctgctcgcttggccataggggctaaccctgtttcctttcctcggctcctcacctgctgttctagtctgagataatcctccaggcagcaaggtggccaggattgactctggggacactgaggcctgggaggccttcaggggaaacggccccctggcgggtggaacgggcagaggcctgtgggctgaggaagggagagtgcaggaggcacccggtggtcttgccgccattgggcagccttcatctcatgttgtggagcttggctttttttgtttattcaggggttttgcagtggagaaccggtttgggttggtgaaatactgtttggcggcgaagtcctgcttgccggcgccctccgcgtccgagggaagagtgtttgctgcctgtgtccctctttcgccctgcccctgtgggaggaagcggggcgtctccttccctccttcctcccgctgcttgcttcttccccacgctgctcctcagtatgcagtaaagtgaactagtggagaaagcatttggctgcatgctctctgcagtggtttgcccttcctccctgcttcaggctacaatccttacaggagacgagacagtgagggggtcttttgtgggccttggcaggtggacacctgagccagccccggcctgggcagaaggagaggtcctgacccgccactgtggtcaagtctttgaaccccctcttgtgcctggcagggtgctgaggctctgttcccccatgctggctgtttctccgcgtcccccagtcttcactgcccacatagcctagagggtgaacccagggtcctgcacagaagagaagggctggaccacccaaacacatgcaccccctttccctctgccctaccccagctggcctgaggctggacagggtccaggagcccactggtgctgcctacccctgctccacatggcccctccacttcccttggtccagaggcacagcccccaggccttgaacagagggccacgcgaagagagtggtcagcagcctctggagtctttgtcctttggaaggctgattggggagcctcagaacagcagtggctgtggccgtcaagcttgcgtctccatctgaagagggtcaggctagccttgctagttgcctcgtgtgcccagccccacccttacagtgatcttagttacaccccttcccccagccctgccagctgccacctccttcccaggcagggctgcggagccgtgtgtggccaggagcgaggtggaggagtgcagggcagggcctgcagctggcgggctggggccgaggctgtgaggagcccgtaaggcctgactgcttttgtgttcttcgcacaggccagcagagccagccgcagagcagccagcccaactacagcaaggcctgggaagactattacaaaaaacagagtgagtgcccggccctcctaacctgtggcagcacagtcccctccagcccagagacttcagagtccaaggctcactgtcacctcttttttccctaatgccttccctgtgtggcttgatctcattatttgccttcgtcctccaccctgtacctgcctgcttctttctgtcaggagtctgggcatagtcagtcagtgaccacaggctgccctgcgactcggcacatcccctcctctttattctccccgtgctgggctccaaaggacttgaggtgggcgtggcacctggaagtgtgggctcagctggcgtctggtctccttagggactgaaagattccggctgggtgccacctggccggcaaacagaccaaccagacatcttgttctctgtcttggtgcttcagggcagatgaggagaggtggtgagattcagggaaggaggccttacctgggcattggagctgggtgcttagtttctcttcttaagtaggcccgttttctaactaccagaaatgaaaccagccttcagagcagggcgagggacccaacaagcaaaaggtctctggggagtcacataaaatcaggaccagactctcgggatatatcccacgattactagaccggaggactgagggcttgtttaaagaggtatctcacgtgccttgtgtttggaggatgtttcttgctggttggaagagatcgggttgaaggctaccagagaagtggtccccctggtgttggcatcatcgccaggttcatggcccttctaggggttggaggtgggggtgttgagtcatggtcaccagagtgctgtaagctcagctgcccagtcttccccaaatcccaattcccagacccctgggcctgtgttgaagctgttcacaggatttggacactatcacaggcacccaagttaggtactccccttctcccccacccccaccccaggatccccccttctctgtctgtcacagggccctgggagctgaaggggcaggcagggagatgcagagaatgcgcttccgcagagagaaggcaggcgtgaggattggtcttcacaggcatagcaggggccgggcaacaagaggctaacagcaccttttgtagcaagcgctcctgcaacaccagcctcacctcactgcctcccagacctccctgccttccagccgtccggagggagagcagatgcccagggcctttgggaagggtcctgcccagtgcacctccgctcccgataacctgtgtttcctcctttgtcaaccaggtcacgccgccagcgctgctcctcaggccagctccccaccggactacacaatggcctgggcagaatattacagacagcaggtcgctttctacggacagacgttagggcaggcgcaggcccacagccaggtctgtagctgatcaccagcaccgctgccactccctagccccgagcccctgctcccaagccttctgtgtttcctgaccccaggatgagagcgctgggctaggaggaacctctgggcgccatagctcctcagcgaggctgcttctgctgagagcccggctccagcccctctgtccctcctcgctctggagaaaaagagtttaggccaagtgggaggattgggggcgcagcccctacaaggaagtgcctgaactttcctcaagtccaggccccagacctcagggctgattagtagtctctctcttcctctaagcctcagtttccctaaccgtaaaggagcaagtgcagagggtgcgctccggcgactgctctcgaggagggtggagtggccaggccgtcagccatgcccgggcagcagcaggaagcagtgagagggcaggggggcagagcccagctttcctctcctgtgcacaacctagagggttctgttcagaggccaaaaacggatttcttattaaagaagggaagacgtccaaatgttcccacagggcgcatttcccacctgatgccagtcaggtcctcatggataacatttcagttacctcctggccctggactcagctggttgggcctctcactgccaaattggccgtctgggtctggtcctggggaaacaggtgtcagggctggtggtgatgg

SEQ ID NO: 33 - DNA, 3005 bp, Homo sapiens
gtgctcgtgtgtttagcctacgtttttctcatgcctccattaccagttgcaattgtgtatctaagacctccaagcttgtttttaaaacaaaacaaaaaacctttctctattatctcagaaatataaatactgttatttttaatattaagaaattcaatataacttttaacacacactgtggaacattaaaccgtataaaaatgtagttataactatttttaattccaaggtgttgtttgcttttttcttttaaatattttcttaatattttgtcagattaactagatgaataaataaatctagtattaaccgcattatgaattaaataattttgatttaatgaaagggataatatgatttccagtgtttactgtagtgtatcttgtacagataacatgtatttttaaaggaaaaaaaacggaattgaagctattttttcttgcatttctaattgacctgagggacattccgtttgaaatgtactgaagttacagtttctggttttttctccttatttttcttataatgcttgaaatgtctaactattaaaaaagacaattggaaaatgttatgcatggggtttttaagaaaacaaagtgttctttttatttgactgacaattcattttacactctatataataaaatctccacaaggcatcttgtgggcaaagtctttctggcctgtttgctttccattcgccggttcatccctctgcccctgcccgcggccgcccgagagggaaagaggattcctgcgggcctcgcccgtcatcttgcaccgcgtccacccgccttcgttggtgcacagtctagatgtctagctagttcgttaagctaattttatgttaatggctctgtatgatttgacagcttgacttgagagccgtggttgggctcagctccccttccctgtcacagtcaggcatctgtaagtgagaagtcagtatgggagtgtcatcggatggagctgggagatgcattgaagggcgtgcggcgggtcagcagacttctgcgactgactgggcagccccttgccctccgcccgctccccttccctgcgtgcccatgcacacacattcgcctgcaaatgtaggtgggctgccctaggcgcggtgtgcttccctgactgttgctgcctgcatcccccacctccttgtccccagcctcacctgtggctgtggtggtggtgctttctcgctcttagccccgtgcccacggtgggacaccagatcgccaggagggctgggaagcatcagcacacgtgctcgttatgtcctgtcctttcatgaagaaacaaatggggcgtccttccccagaggtgttaagttacagtcctgtggtcttaggactcgtggcgacagtgtgggcctcagacttggaagggcattaagtaatagcatcagccctcgcctttttttttccttctgtcccgttggttggggtgactggcattgagcagtgtctgctttcacgtctgaggggccctgccttcgccctcaggctttctgtgcgggtctctacttagatatagagacctgtttccatcctgaacggggcttgctgggctgtgcctggccaataccggccccttgtctgtactccaagcttctgacaggaggggaaaaaagcagctgtggctccttcaggccgaaaaggggtgtggagagcagcccatctgcggccatggcaggcctgttgagagccggaagacaaaaaggagatgtggcatttttaactgcacctctagagaatcgagtttgacgttgagaaattgaatagtaaaaggcacttggaaagtggggggagggggccgagtgggaggagggcgtaaacgctgatgacggtaatgggaattcgggagagggcattacagagaagacttccttctaattcatcttccaagctctgtgccaaaacagcatttggcatggttcacagggagcgattgtgtgataatgaaccctaaggtgtcccttaattgaagactgagcattgtggtttgtgccaagagtcataaatggcgcaggcttgcggaggatgcattttcttaaatgtatcggtaagtacagattagcgcttgtccccagtgaaatgcccatactataaattatggaaatctctctttctctctgatgcaatcttttattggggggagggggtgtggtacgacaggaggcggggggggaaagtttgcaagcatatgaaatttggcctctcattaacatggcgcccaaggaagatgattttcatcagcagtctggtgtactggaggctaaagtgcttgaaatgtaccaagttcagcggttgtgttccattaagaaagatgcatggtcatcactgtaagggcggtcggggtccgggaggcggggcgggcgcttgcccagtctgtcttctgaatgcatgccccacccccacccgccaccgcccatgcctactgggtctctgccagcctcccaagttcaggatccatcaaggaccctgctgagccgatcccagccccacccagaagtttgggctggggttgaggagttctcagccagcgggcctcaatcagtacccctggcctcccatcagataggaggcaccatctttccagggtcactcgacagtggtgaccacccatgatgtcccagagcccccaaggtagggtcggctggggcacagatggcacagtgcagtgcctggtccatgagaacgtgggtcaccccagagccgcagcttctagctggctacagccccactctctcccagccccacttctggtccactagggcccagctggggttttttaagatgggctgaagcaaatgggcctgatagatgcttagagattaatggccagaaagtggcttgacactcaattccgcagggggctgcaggccctgggtctgtgtcttgggtagggtggaaggggaagcaaagacaaccctcactgcccttgaaacaatggtcatcttggctgtcctttgtcttgaaggtgtttctgtagcatctaccaagggg

SEQ ID NO: 34 - DNA, 1551 bp, Homo sapiens
atctctgcgcgtcgccctcttttccccctttacgatttctgttcctctcttaatttaccgtgaagactaattccacttccattcacgctatgtcaaccatctaatcccccttttttgtaaggggaattcctcggccccttttaaacaagtcccctccgcattgagctacaatttactgctacagcattcttccagggctaatgaatttagaattagcaatttctttcgaatggagccgaatgaatgcgatcactttaacagcgtgacaaattgcccgccgcgccgcaatggacaccgtttaacccccccctttcagccggcccgctcgccgggtattttcccaggtagcttagaggggaaccttgtaagacatggaggccgcccttgtgcgcctcgccgcttccagccctgccgcagatgcccgacaggggaaccctcggggagctgggggccgccgcggctcctccccgcccagagagatgacatcggggtttgtctgagcccgggcgccgccctccctggcaccccagggcctgggagcagagagggactcgggcgcgcccggggtcacacagcgagcgcagagcctggccagctgctgccggtgcttctttggcacctccaacacctgccagcccgaggtctgtccccagcgctgatcacggcccggctcctctgccagtgcccagagcctggacacacagtgggctcccggaagccgactaggcgaaagagtctccggttggccttcacctccttgcaggacctggcctcagtttccctgtgcataaaaccgctcgctgccgttggctcattaattcttaaacttatccggggcagaggatggaagaagttgcgaatgctttgagaattcgcggagagactaaaaacccacttctaaaaatgatccccaacgcaccactcgctttccagggcacggagggtctccaggttgcaaacagaggagaggtcgttgagcctccgcacatccgacttcctccacacccgggtggcttctctggatttggggccgacttgggtttggctggtctgggcaggaccgaagccggggtcccggcggggaaggaagggccgggcctcggctgcctcgggctctgaccggttttcctggccccgccgccgcagaagtgcagaagctgtccagcctggtgctgcctgcggaggtgatcatcgctcagagctccatccctggcgagggcctcggcatcttctccaagacgtggatcaaggcgggaaccgagatgggccccttcaccggccgcgtgatcgccccggagcacgtggacatctgcaagaacaacaacctcatgtgggaggtacgcgcgggctggggcagaggggcgcaagggccggcgaggggcgctggtcgcgggtaggactcgggcgtccggccgtcgccgcttccacccgggctgagagcggcggacactcctggcctggacgccccctgagccgggactctaagccgcccgagcctggagctcaccccgcctctaggctcctcccaacccgtgccgaaaatccgaccct

SEQ ID NO: 35 - DNA, 1605 bp, Homo sapiens
ccagaggaaggaagacgtagtgaacgccagagttctgagtgtgggctctgcaggctgaaccaagcagacacagagggggccctgtctctgaccacagaagccaacgcggggtcctggcctggtttcagacacctctagatggaatcccatgcgatcttttgtgcttcaactaaaaaaggacctgccaggaaaacaaaccagctgttgcctgggggtgtctgggtttctctgggcacatcggatagtggcccccaggggaaggtgccaaggccagcacttctggagtccaggccttgggagagtgataggatgtcccttctctcatacgccctgcctggctagggcctggagcttccccacttgggaggggtaactggcttccataagaggcctggcaggcaggccccttgggatgtcccggagtgtgtggcatttatgatcagtgccaccccagaagcaggccccttacgcctccctggatcatcactgcaaaaccctctgaccaacatcctttgccatgagcctggggcaggtcctccccgagagcatcagagccccaacatcatttgcggggttctctgtcattgacctaggacgcggtgaactggactctgtgtaaggcagtgtaccccaatgtttcctggggtggaggtgttcatccatccgaatgcttcttttttagcatctgccgtgtgcacagagacactcagagccctgtgcttggtcgggaagtacctgtgatgtgggatgcctatgggagctttggataagagatgtttccggaacattatcgcctcagggtatagccaagtaccctggggtgccccacagcccacccttcttggaaacatctggctcagccctgcagccctgggggctggctgactctagttccccggggtaagaatggaaaaggtttctagttttccatctcccattacttctgcttgctgtgaggcgtccactctggtgctgtcagcttggaagcactcctgtggctggagcttggacagagatggcctgggcagggagaggggggcagaggggctcgacaccccagggacttccgtgtttgtgcagcttcccgggacagctcagtggaaatgggactgtgtggctttctcagggctgagactgggtccgggtctcctggctgtggaggggtgctcagagacccccaactctcacctcccagctgcggcctccctgacctcctcttgccttcttccctgcagatgatcccacctgaccaggaactgctggtgtggtacggaaactcacacaacaccttcctggggatcccaggtgtgcccgggctagaggaggaccagaaaaagaacaagcatggtaggtgttccccatggggccgctgagacacagacccatggagaggggagcccagggaggggagagagagaatgagagaggcagagaggctcttggcctccagggaccttggttcaatgtctggcagcattgagcagatcagacatacaggtccaaggaggctgatgcccctggagctgccgcatgggccgggcatgggtgggagatggtcctcctgcttcctggccagaatagactgtctggggggtatgtggggga

SEQ ID NO: 36 - DNA, 1470 bp, Homo sapiens
caacagaagaggtggaaggtggagaccaactccaggctggattcggtcttgctgctctcgtccatgaaccttcctggaggagagctggtaagggctacagctggggccatggactagggcccagtgggctggggggagccgtgggaccctttgttccaccagaggactttgatttacactgaggttgcccctttgactcctgtttgtctgctgtgaagtttgctgcctagatgtgtatgtagacttttcaccctgtccaggtctcccgaaagagggagcagttggcatatggtaggatcagaaacatccatggggtgggatcccaacagagagttggggagagaagcccttagatgctggttgttaacagttttcctttttggatataacagccttgcatagtgaagatgttccttgaaaagttgtctttacattaggtttttgtgaattgaaaggcatttcattcaaccatgtgtggaatgtggttgctggcattccagacaaccacagtaactaagccacagccttttgtaaaatgccatggttcaccttgatcttcagtccagcgtgtatttacagagaggcttactgtgccaagctctgtgccgagtgccaagcacgattgagttccccagcaggggatataagataactgacctagtccctggcagtagaagaataaataagctgtggttatacaaaaggaaatttcagtgagagaagcttgtaggaaagacaggcattggagttgatcctggaaggatggagagactttgaatgactagttcagggaatctgagataaagggaaatgtatgagcagagatatatccaagcaggagttagtctggtcctgctggaccacagagggctgtcatggaagatgactatggaaatgttggctaggtgagattgggaggggtctgaatgttcctcagagaagggagggaaagaggaagaggagctgtggaaaagtcttttgagatggaaagtcgtgattatcactgattcccctcaagtggcttgggttacctactcttgctatagttctcagtgcttgaatattgtggttggcctcaaacatctcaaaaggaagtgaaagagaagtgatggagacctttctgaggatctggcttaagtaatgtcatttctttgtgtatttcagaggagaagatctgcagaagatgagcttgcaatgagaggtttcttacaggaaggggaccttatcagtgtatcctgcgctttgcactccagcctcttgatgcttttctgtgggactgggaaatgggccttccattgtatgtctctgacggaagaaccatgtcatccttgcagggatccgagtcttagaccaagtgtcgggctctgctgcatcctttctcagtctccttaattcaggctgactccccagctcttgttgggacctgctgctaagtcatttctttgggtcttgtaacttacggtggcctgt

SEQ ID NO: 37 - DNA, 1755 bp, Homo sapiens
tgacaaccaaggggagaggtaaggtcacagtgatgtgctctgggtcaaagattgttgagcctggaccattggagaggggaggaaaagatggaggtgtggggtcaaggggagaggctgcagaggacaggacagtgtgtggccaaggctgctgtttgttccttcatcaccctggccaggctgaggtccaggcagtgttctctgacggagctgtctctttgcacacgaggagcctgaaatatggaaaagtaagtcgggctcttgatgttcctgtttgctgactgagactacaaggctatttttgaatccccatagctctctggaattctggcctaaagaaccccagtagctaagcattaatagaggctggcatcccacaaactgatcgtgttccttaaacgtaacatcaggacggtcagggttcacagggtcatgggtcagtagccttgtaaagaacaagttttatcctttttctccaaggagactgactttcaccagaagagcccctccaactgtgggctgggaggtgcagctgtctctcttcctccagggggcgctgcagctcagcactggggctgaggctgtcctgggaacaaaggcaggctgggtctggttaaacagcccttagacaaacgtccaatcagtccagtggatgttattgctggcaaagcttgctctgtcatctgagcctctaaatggaatttcactgcttttcttgtacgaggttgcattattgaagctatttactattttaaggagagcatacttcctaaaacaaattaggatttactagtctcttagctttatctgggtgaacgtttttattttctgagtggaacaaaaacctcttcccttaatggagtggctgcagacagccacgttgatgtacatggagtaggcagaggactgctgcagtatgctgactttcacaaccctgggtcctgcggactcttccttggcaggacgtggacttgagctgtcctgccaggaccagacatggatttgcacccagctccacccatctccttacctacccagaggcacacatctcacaggcaagatgagtgtttggggttcaggtatgagctagggtcatggaacaacgcagtgctcctgggccagcaggaggctccagctcacttcctcattggcttcagcttctctaatgtctggcacatgagttctggcttagagtgcaaggaagactgcaaagggaaatgacagagaagagtattgaaggtcaccttctgctgggatgtatgaatagcctctgagtcccaaagcgttctctgcaaaaatgtgtactatgtgtatgcatgtaggcgacagcaattataaacaggaaggacaccaatttgaatatacttaggatgtatattctgtagtctccttttcattcatcccgccaatcttgcagtgacctagcttcgtgatatatttctttagctaggtcagggggttttggtccaggtttccccctccctggtgaaacggcagaagacccactttcatgatttgccatgtggtgcctcagtgattctcggtaacaacggcttcatctggatttacccaacacctgagcacaaagaagaggaagcagggggcttcattgcaaacctggaggtgagcaaacactgtggccattttcagtgggatggagggggctcagtctttgctgtgtttttgtggccagtgaagttggttgtttttagctatgttactggtgtaggctgagtcactttgactttccatcacggt

SEQ ID NO: 38 - DNA, 2304 bp, Homo sapiens
gtggcttatgcctgtaatttcacactttgggaggccaaaggcaggtggattgcttgagcccaggagttcaagatcatcctgggcaacataagaagaccctgtctctacaacaagaacaaaagaaattagccagacgtgttatcacacctgtgttcccagctacttgagtggctgaggtgggagggtcacttgagctcgggaggccaatgctgcagtgagccatgatcacgccactgcactgcagcctgggtaacagagcaagaccccatctcaaaacaaagtttgagaactgttgctatggaaagtctatcaagaaggcacatagggatgtttgttgctgaagtactaacactgaatgatgtctgtgttgtggtgagtagaaaaaaagcaatttgaaaatcattatttatggtatggccccatttttgtaaaacaaaaatatctgtttatttgtgtatgtccaggaaaaaaaagtatggaaggattttacaccgaaatttttatctctagggacttggagctttaggtggaatcggagaaaactttctctttttggtttgtgtgatgttccaagtgtctttttacaacaaacttgggttatcttataatacgaaaaattcgaagatttaaaaactgaggccaggcacggtggctcatgcctataatcccagcactttgggaggttgacacatgtggatcacctgaggtcaggagtttgagaccagcttgaccaagaaggtaaaaccctgtctctactaaaaatacaaaaattagctgggcgtggttgcaggtgcctgtagtcccagctactcgggaggctgagacaggagagttgcttagacccaggaggtcgaggttgcaacgagctgagattgcacgccactgcactcccagcctgggcgacggagtgagactccatctcaaaataaataaataaataaaaataaaaactgaattgatgacagcccaacctgtcacttttttcagatccctttttatgaaagaatttgcttaagttgtgtctgaagacaaaccaatttctttggaccctgggtattctttttctaagggaataccatgttattttgtgttacagattgtttgcgatctttcataggctgatctttctagagttggttaatatccatgtaggttagattgaaaaacttgaattcagaaatgtacggtgttggagcagacatggatctggaagccaagaatagcgttggtgttgttgttgatggtgaatctgaaagagtgggcagatggcaactttttgccagaatcattcagggtcaaagggctagtcatatttacaagggaaaagaggaaaccatgttattaaatatttcatgcaccatatgttcctttcaaatttcagtggcttgactaagaaaattcacttttgggagagttggtacaacaattgaaagcacttagtagtcaactttttccttagtgtttccttcttccttcaacaaacatttattttattgagcacagactatgacaggtcgtgttgtagtcactgatgatatatttgtaaacaaaacaatccctgccctcctagaacttacattctagtgggaggagacacatcataaataagctaagtaaataaaatacagatatgttagtgatatgtgctgaggagaagaataacatagagaaggggacagggaatggggtaggaggtgtaattttagttagggtggctagagaggcctgactgagagggcggcatttgattaaagacccgaaggaggaagatgagcagcaggccctgttgaaatatgtgaaagaatttcaggccgagggaaccaggatgcagaaacctgaggcagagcttgctagtttcaaggagcagcctagaggccactgcaccagagcaaagagcaaaaggagagatgcaggaggtaaaatggagggtgggaagagaatggctgaaggagagggtggccttattggcccatttcaaggattttgactttgattcatatgatgtgggaaggccttggagaattttccgaggggactatactatctgatgtatgtttcagtatgaaatagaatctctctggctgctatgatctgaaggaggacaagggagcagggattccacgggggcattgattgcacagagccaggtaagagtgatgatgcttggaccaaagtggtggcactgggtggagggtcagaaccgacaagatttgctctcggattagatgtgggatatgggggtgtgagaggggccaagtgtgactctcaggttttcgaactgaataactggaagaatagagttgc

SEQ ID NO: 39 - DNA, 1382 bp, Homo sapiens
atttggaaagattatatccatctacttaatgctagggattggattgtggcacgtggactgtgaaaatgcaaaattggaggtatgtactttattttagagacagggtcttgctttgtcacccaggctggagtgtagtggcacagtcatagctcactgcagccttgaactcctgggctccagtgatcctcttgccttagcctcccaaagcaatgggatcgtacaggtgagccattgcacctggccatgtatgtacattttttataagcattcagttgtttccaatagtctaatacattttgtatggccttcttatttttcatgaaaccttactacccattttaagaaatttgtaatatagaagaaaacagaagtttcaattgtggggtaagtaaagaaagatgatcaaagatgatttgaccaaaagagttttacttcatttaaatgaagcatgttgtcaaagaaaatgaaagtgggaaaaaatgtgaaatcattttgtatcagttcaggacagaaccgtgcttgtgcttcagatctccaagtgtgaacacactgatgtgttgtgaagtgtgttgcaaatagaagcattttttgaatgggagggagagggatgtgttaacatgatttagctgggaattaaacccataggaatgtgtcgggcatattttctgtgactagggggtaaaaagattaaaatggctactgaggatgggcttcagtaagaggaggtctcccgaaggccttctctgccctgtgcctctgcagttccctgactccttgctgtgttcgtccctgcctttttggtagttgtgcccctgatgtcactcccctgtgtgttcagatcctacctgctggccaggtgcagtggctcacacctgtaatcccagcactttgggaacccaaggtgggacggtcctctgagaccaggagtttgagagagtggcctggacaacatagcaacaccctattagtactaaaaataaaaaagttagctaggcataataatgtcctgtgcttgtctagctacttgggaggctgaggcagaaggattacttgagtccaggagttcgaggctgaagcaaactgtgatcatatcattgtactccagcctgtgtgataaagcaagaccctatcctttaaaagtaaaaaacaaacaaacaaacaaaaaacaaacctgcttaacctttcaacactctcttccagtcccccctcccttctgaaaccatattttacatctctggtcctcattaaattttctgtaacttctgcccttgtaactcttctgcaacacaaatgaatacataatcatatacttcctagtagtatttcctaatagttttatgtgagtttcatggaagagagtgttgaaacgtaggtaggtttgt

SEQ ID NO: 40 - DNA, 1256 bp, Homo sapiens
aaatttttaagagataaggtcttgctttgtcgcccaggctggagtacaatgatatgatcactgttcactgcagcctcgaactcctcaagtaaactgtaagcttgtgaatgcaggtttcatctcattttctgtttccccagcataatgctgaatacataggctctccataaaaaaaattcttgataagaatgatattaaatggactaaatgagaaattaaactttttattcacttacaaggaatgaaagttctcaaatagctaacttattttcttatgtatcctaggactttttatctggttctggggtttctttcccaatgaatatacttatatatgtttattttatttatttatttttgtatttttaaaaaccagaacatttattgtgtggctaatctttgaaattcttggctgggctcggtggctcatgcctgtaatcccagcactttaggaggccaagatgggcggatcacttgagctcaggagtttgagaccagcctggccaacatggtgaaaacccatctttacttaaaaattagccaggcgtggtgacgcatacctgtaatcccagctacctgggattgtgccactgcactccagcctgggcgacagagcgaaaccctgtctttaaaaaaaaaaaaaaaaaaaaaaagcaaataaattcttgagatgaactggatgctgcaacagctgcccttttgggtttaggtgttgttcctttatggaaatccacgccgcttcattcgcccagtccctgtggcctttagtcttttagccttggcacaccagtcatacttcctcttgcgcttggcggggtagccacatttgccacaggtagacttcggaaggtgacaggccttagagccacagtggccgcacaacgtgtgcatcatattgcaacgcttttcaaacgataacgttccctttgtcatctcccttctgtgtttatttttttattgtggtaaaatatacagaaaagttaccattttaacctgtttaggtgtataactcagtggcattaagtatattcccagtgatgcagtcatcatcactatccattttcagaactttttcatcatcctaagtagaaactctgtacccattaaaaaataatatcccatttccctctttccccacttcttggtaaccacttttatgctttttctctctatgaatttgctcattctaggacttcatataactataataatacaatatttgcccttttgtgtctggcttatttcacttagtgttt

SEQ ID NO: 41 - DNA, 1563 bp, Homo sapiens
tctaacacgagtgactccatgttcagacagtaggatcacaaatgattattatatagcaatgaatggccacaggtacatagactaaggagccacatccctgctcctgggatatcctttagtcaaagggctagaagggtcctggaggtttgccacttctccgtgttgaggtacagagttcctagactaagggactggctgcattgttatgtgtgagtgctagtcatggtgctgcctggcacccacaaatgccacagcagacccatggtcgagggagaggagcaggaataccagttaccatgccggagtaacagttacggcactgatgcaccagttaccatgccagagtaacagttacagcactggtataccagctaccatgccggagtaacagttaccacactgatataccagttaccatgccggagtaacagttaccgcactgatgcaccagttaccatgccagagtaacaattatagcactggtataccagctaccatgccagagtaacagttaccacactgatatactagttaccatcccagagtaacagttaccgcactgatgcaccagttaccatgccagagtaacagttacagcactggtataccagttaccatgccggagtaacagttactgcactgataataccagttaccatgctggagtaacagttaccacactggtataccagttaccatgccggagtaacagttaccgcactggtataccagttaccatgccagagtgactgattttgaccaagacctttgggttgtacagaaggggtgagaccatacctgtcctcaagcatttccaacctagtgtagagaaaaacaggagcaagataagaacaacgtactgaaaaggaaattggatgagggcctggaaaaaggggtaaagtgagctggttgggattggtgagtgccacagcttcctgccccttaacagatcagtgccatggtggctgtggtgtccctggcccagaccttctcagacagggcctgggtgccctttacagagcagttgggaagagaagggaacctagccttgtgaccttttgctccacagacctagtcctttgttgtggtgcgaggctcagtcgtcagcccaccgagtcatgtatgttctctggttgcccctggttttggctgaactcaaaggatggctgtctgtgaggagtactggtactttttgccacttgtgtgccctaactgtggtggatgccattttggggattatgctcagcagtgagtcacgtgagatgcacacgtagcttttcggtgattaatccaggtcaatgcccttacccacatacttctgagatgtactgatgatgactacatttaaagctttttctccattggctagaagttgagacccatttcaacaaaagcacttccacctctcctgaagtgcattgggaaaactggaggccattactagatttacagatgatgggccgtgcttaaataacccatcttagctagactccaggtttcgtcacatattccctacctgttgctgccattgagggctttctctgtgctaggcactaccaaata

SEQ ID NO: 42 - DNA, 2701 bp, Homo sapiens
gtccttgagggagatctttcttctctaggaatatagctgagcttaccccagaaaccaggggagaaaataggagccgagttttctggagtgcgtttcttctgtgaagtgaggtttgtgtgtaggaggcatctgtccagagcttttcaagttttatttcattattgctggagggaactagctctggtcctgttggttgggactgaactgtattgctgaccctttcccatgttcaaagttcccgcttccattgggggactgtgctttgtgcttcttcttgtaacaatgtgtttagcttatttagcagcatcagattctccttctgatatatgcattcgataaacctggacacctgtgcagatttctttttcgtggtggcactgtgttttcttttgcttgttatgcgtaaggtcagatatgttgtgttttgggtccctgacaccttgggcttggatgaataatgtcacttaagaggaggcaagtaaaaggccaggcacagtggctcatgcctgtaatcccagcactttgggaggccagggcaggtggatcacgaggtcaggagttcgagatcagcctggctaacatggtgaaaccctgtctctactaaaaatacaaaaattagctgggcgtggtggcgcatgcctgtaatcccagctaattgggaggctgaggtgggagaatcacttgaacctgggaggtggaggttgcagtgagccaagattgtgccactgtactccagtctgggtgacagagcaagactgtctcaaaaaaaaaaaaaaagaggatacaagggatacaagtagaatttgtagtgtgctgattaaccaaagacaagttcctccacccttttctttttggccagagttgatcattttcagaattcatcattttgtcaagatgatttttttgttgttaaatatgaataatttgctttcctctggacttctaaggcttcctgaaattacatgcaaacatttgtgcagtctcatgtttggttattggtttttgggtttgctatttttgggcgaggaggtccatatccttcatcagcttctcaaggggttttttcagaggtacaaggggaggctttggtttggttatgacagtgctacagccagcaacccgggggccacctgggtgctgctcccccacttcaaaacgtgtagctagcaggatggaaatcctgtctacatggaaatccttgtggtgttggataggccatgattcatttccctaagcctcaaatgcttctattgtttgtagtttttctcccagaatcttcatgatccatttttgtacattcttatggccttacgataaattcctagaagtggaatttctacatcaaaagaatagaaacttttaaaggtttttgatacatattgccagttgcccttctggaaggtctactgggtacgtcagtgtacctgagtgttaacagtgacggatcagtattcatttctcttataaggaaggaaatgaaagtcatttggtaacgtagaggcacaattagacctgacagcctttgtgtttctcttctgttctttaggccccccagttccctttgctgctttcttctttatgccacagatttaatgcttgaacacatattgaaattttggaaagttactgtgaatctaatggggcataataggcaggttttcttaatcctggcaatgaccaaactaatcacttgtctgtggtggcttggtggaaaaacggtttgtcagcagaatttggtaaagaagcagtcacaaggacagggtgttggtctcatatttgagtgcttccctgaggaaagaaaagataaagggaagaattgggtgaattcatcagactgtatttggcagatggagatgaagtgggtgcaggtcatcgcccacgacctgtttcccaggcttgcagagaaactgctgctcaggagcttgtgactgtgagggccccgggccgtggcatgcgttggtgcgctctcaagaatgcggccatggcactcacagacacataccaagaagcctcggcccccagtgcccccgccagcctgctcaggggcatgcggatgactggagcctggaaggcgggtcttgctgggcaggacagatgccttactgtcaggacagatgccttactgtaggcccaggaagagatccatgaccgcagacagacttctgcgtagggccctgaggaaagagtggtaaacatgcagtgaagggcggccccaccactggtggcttctgacagggagctggagggtgcaggtactggatgtgtctcattgggatacaaatgagtgtgccccgtggttaggaagatgaggaagtgtaggcacttgcaggggccttttcttttgacttagtgagttcccaccaaacctggccttgtctgtttttgatgccttaggacttggggacaaggccacagcctgtgaccccagcatcatctccccccagggccttgccaccctctagctttcatccttgcctcctcctctgccctctctttcttgtccgatacagtcacaagtgcctagaataaacctcacaccacccactgctctgctgtcagggctaccaccccggccccaccctgccttgccccggctctgatctcaaagacttcccagcctcctgttgccatctgggtctgtcctcctcctgctagcagagagaccctcccttagaaacttacatcagatcttttcactacc

SEQ ID NO: 43 - DNA, 2406 bp, Homo sapiens
aatgagtagaggaatcaaggaacctctcagggctttgtgttgggacgctgacacactgcattagtaccttctagactatgagcaggggaatcgaggaacctctcagggctttgtgttgggacactgactcactgcattagtaccttctagactatgagcaggggaatcgaggaacctctcagggctttgtgttgggacgctgacacactgcattggtactttctagactgtgagcaggggaatcgaggaacctctcagggctttgtgttgggacgctgacacactgcattagtactttgtagactgtgagcaggggaatcgaggaacctctcagggctttgtgttgggacgctgacacactgcattagtactttgtagactgtgagcaggggaatcgaggaacctctcagggctttgtgttgggacgctgacacactgcattagtactttctagactgtgagcagaggaatcgaggaacctctcagggctttgtgttgggacactgactcactgcattagtactttctagactgtgagcaggggaatcgaggaacctctcagggctttgtgttgggacactgactcactgcattagtactttctagactgtgagcaggggaatcgaggaacctctcagggctttgtgttgggacgctgacacactgcattagtactttctagactgtgagcaggggaatcgaggaacctctcagggctttgtgttgggacgctgacacactgcattagtactttgtagactgtgagcaggggaatcgaggaacctctcagggctttgtgttgggacgctgacacactgcattagtactttctagactgtgagcagaggaatcgaggaacctctcagggctttgtgttgggacactgactcactgcattagtactttctagactgtgagcaggggaatcgaggaacctctcagggctttgtgttgggacactgactcactgcattagtactttctagactgtgagcaggggaattgaggaacctctcagggctttgtgttgggacactgacacactgcattaatactttccaaactttatgttcttcagagaagacccctccttgctgggggtgaggaggtggagaagtgggtcaggcgtgtgccttggctggctgccgcttcatatacagacgtatgatccctggttttcccccgccctctgtgtctcactcccttcctccactgcacttgccatcttcatgtttggggctcttctgggcagatgggcttgatcctcacctgtgaattcctctgctctcctttgccaagcaatgcttgcccatccactttcagatcccccagtttgttgaaatatctagtatgatgacagcttctctgttctcaccattgtcgtggtttataccttttttactccttggctgtaatttaaaggggtcacaggcaggagggggatgagtgcatgtgctcagtccaccatcttgaccgggagccccagaggcatcatttcaattcctgtgatattatggattcctacgggtaggaaaaacacagcccattcaaccaaatatactttaacccctagagatttagctttaacttgtttagaattgtttaaaagtcccttgtattttgcagttttttcattttctccttgaaagtaaaaacatttgtggcaaatagggaagaaaaactttccagttaatcgagaattaggataagtgagatttaaatattatcagatactgataagaactatggcttttaaagaatgtcgtcttagaatcagtttctaattacttgtgtgcagaagagtcctgcagctgtgaggtgatcacagtctttggcctaagccactgccaggtgagtgaaagccaatctggagtcacagagtggcagcgactgcaccggagatgtgtgtgccatttgttaagatgagtcaaatggtagttagggcaacgaagatccacagagggagaaagaaagatactggaaaagcagcagcacagtttaataacagtcatcgttcatgatggcaaggttgtttactataaaaattccatccttcttgcctctgtgctgccccccaccatttttttatttgacattagggcttgctgatttatggcataacgcagtacatttcacctctgaaacaaagtctgtaaaatcttgagatatattaaagtctttattccccaacgctaaagacctcatactgtttagtcctctatacatttagccctttatgcttggggagggggaggttataaatttctagagggaactggattggcaatggtatgtttgatggtgaaatgccttgactaaacaaacaaggctgctccagaaacgcacacacagcaaacctatatgccatataagtaacgtgttatgtggggagttactttaggttta

SEQ ID NO: 44 - DNA, 2169 bp, Homo sapiens
ccgtatttaagtattaggtggtgactccatacaaaatatttaacagcttgctggttaacatttaaatctttgttgctaagaccttttctatgtttgacagttattccaaacacgttccatataggaatagtttgccaaatagaagaacacgggatattcttctcccatggctgatgtgttgtgattctaggtgcatatttctgtttccaagaacacggacctgttctcaagttcaaacactgcatcaagagactgtgccccatgtcttttcacttttttccctctctctttctctccccttcccctccttgatttaatttcttcagcaggtcagaattgatacagcttccagaagaaatagtagaagtaggcaaaagattagtttttaattcttgttctgtcaaatactttttgattgaaattgtttttattacaaaggtagcatttgctttttgaaaaacaaaataagaaaaatctttttaatcacttcactattaagtttgttgaatattccctcataactttttctcctggctttttgagtatttgagacatttctttccacattgcagttttgaaacattctaccccacactcatacatgaaagtgaaggctctgcttctcagagtacagtttaatttactttgtggacatcattaacaaaaggcagagaaagacattggaccatactaattgtgggacttagaaaagctatattagtgatggttattaagtatcgcttgcagtggagtctgtaacatattcctatgaagttaatctaactactgagatagtgggagtgcagaggaggcatgctgtgagatggagtggtattttccagcatggcttttctgtttcttgaaaaccctacagcactttgccatggtttctcatctggatgaaataaagcacctgtaccttagtatgtcctgccatgcctttgtatggcatacttggctttgttctccaggcctcttcccacagtaacaacggattctttaggaattggaagggggggccgggcatggtgactcacgcctgtaatcctgggactttgggaggctgaggcgggtggatcacgaggtcaggagtttgagaccaacctggccaatatggtgaaaccctgtctctactaaaaatacaaaaaagaattagctgggtgtggtggggcatgcctgtagtcccagctactcgggaggctgaggcagaagaattgcttgaacccaggaggcggaggttgcagtgagctaagatcgtgccactgcactccagcctgggtggcagagactccgtctcaaaaaaaaaaaaaaaaaagaattggaagggaatggaggaagcaaggtggttaaacaaaaatcatctttacacacaccacccactctatgatgtatatgagttcagaagagcactttgctttatccttaatagaaatatctgtaaagccaggggagtcataaagctgtaggctaagtaaggtgccatgagaaaaggaggcttcacttacgccagtatttggagcagcgtttggcctcttggaggtgtttgcacccatcggagatgctccatagtgagatttaggataagtgcaaggtgagctttgcttttgtaaaatgcatgaagtgtgaccacgaaagggccatgggaaagaattattgatgggttacaggtgcatcgtttcaggcagattgacactaggaaagagcaaagagcaggtagaggtttgacagtttactcctttaaagtaatccatgtccaataacccatggaaagtcttcatgtacttctaaggggtagacataccctagtctaggtgctaatctaggttctatcatgtgttagctgtgaccctgggcaaataactttatcctatggcctcaatttcatcttgcaaaaaaatacggattagataatggcacttccttaaaaggtttgatgggatttcaatggaatattgcatagaaagtgcttgaggcattgtaagtacacagtaagtgaagtgttgaccattattaatatcatgatgataaagtgtgtaacttattttataagtaccatataattgaaatttgccaatagtaactcctcggagacttccagggaactctgtcaatcaaaaaaagctttgtgtaataatggacgctaccttgacagagtgtgttagtcaagag

SEQ ID NO: 45 - DNA, 1518 bp, Homo sapiens
tctctcttcttcatcttggttaatttctactcatcttttttgaaatgcacatactgtccttttctttgtccattcagctgagtatatccagtgaattttttatttcaaaaagttaatttttttcagttctagaattgccatttaattattttttgttgttcctatttcccccattgagatttcctacttcttagctgagattttcattcattggaaacatgccttatactgcttcattgagatgattataatagctgcttaaaatctttgtctattccagcattttgttgatctgcaggttagactggcagttgaactaatttgtcccactgtcttgcttctttgtatggtgggtagttctggattgtttactggactgtatgaatgtcaaattctggatattctggattctgttacttttctctaatacttgtttggttttatcaggtggttttcttggctgggtttgaacacaaatgtgtttctctctgagatctttagtctgtagctgagctgctttgtgtctgtcccatgcatgagtggctcaagggtcagtcagggatgtgattgtacggggattggagatcttcccctgcctttttcccttctaggattacttcagtctatttatttatttgtttatttatttagagacagaagtcttcctctgtcacccaggctggagtgcaatggcgcgatctcagctcactgcaacccctacctcccgggttcaagcgattctcctgcctcagcctcctgagtagctgggattacaggcccgcaccaccacgcccggctaatttttgtattcttagtagagaaggggttttgccatgttggccaggctggtcacgaactcgtgaactcatgctctacccgcctcagcctccccaagtgctgggattacaagcgagagccactgcgcccagccggctctctttgttattcatagtttcctggcttctcttttctgagccacccagccaaaaatgctttgactttttctatgcatgtttctgtcatgtctgtgcatgacataaatcataatatcctaagacacaaaattgttaaaggcaataatttggaaacatacaacaataaataaaatggttatagagatgtaactttaaaaagttgaacattttgttaaaacgattcctgaatatgctggaaaattcagatagttaacaaaatattttgaggataaaaaggaaaggaatctgttatctggaggtagaataacttggccattttacagaaaggaaacaaattctgatttcactttttgtatatcatccatttgacaattttcaataaaaggtttattgaaaacggaatacataaggctggtgtttggacctttttcctaattagaaattgtccatgtctccaaagattattaactcagtttattatcagctaaagagatcttaaagttgactaaacacctggaaattaaaacttaggccaacacatcaaagtctttatgacttgaagtgttttaagaattaatgaggc

SEQ ID NO: 46 - DNA, 1804 bp, Homo sapiens
tagttaatttagaaggtttaaatcacgagaagttaagcccaaatcttgggttgatttaattgttgtgttaacattgtttttatatcataataaaatcagaaggatgcatagacttgtttttaagctaatattaacttctatttctagcccaaagagtcatctatcaaaagccagctcatattaagtagggggaccaagagggaggtctctcagttaaacaaagttattgacttgtctttagacaggcaagacagagtatctcctcataaggttttcttttaacctttttgttctgaagttaatatgtcttttaagtgaataatcttgtttataacaacattttcttttctgttttgtttgtttgtttgtttgagacagagtctcgcactgtcacccaggctggagtgcagtggcacagtcttggctcactgcaacctctgcctcctgggttcaagtgattctcctgcctcagcctcccgagtagctgggactacaggcacatgccaccactcccatctaatttgttttgtgtttttagtagagacggggtttcacaatattggtcaggctggtctcgaactcctgacctcgtgattcacccacctcggcctcccaaagtgctgggataacaggcatgagccactgcacccagctataacaacattttcaaagtggcacattttaatatgaataaaccttctacaatcacaggcctagaaagtttttctttttcttacggaatttcttgactgtttacttgtactagatatttcttcggtatattcataatgacagaacaattgtttatgattgattgatctccaaagtttcccaagaaaagagaaaaagtaggaggggaaggaagaaagaagtgagcagaagttggcttcagagagataggaagggccagttcccttctctgtttaaggaggggagaagacttagatgcagggaaactcattttgacatgccaactcaaaccacagaagccagagtcagttcagctggtttcagtagtaactcaggaccttgacaattctgttaagccatgtcctttaaaagccagctcttattaagtagggggatgaagggggaagcccttcagttaaacaaagttactgacctgtcttttagacaggcaggacagaggatctcctcatgaggtttttttaacctttttgttctgaagttaatgtgtgttttaaatgaataatcttatttataacaacattttcagcgtggcaactgcagtttcagaatggtggaattataccagtcagagagagatgcaaatgatttaaaataggaagaaagcaggtgtctggcccagaggaccagattaagaagaccccatgagagttacaatagttagtgaaaatggtgcttctgcaaacctcatgtctacagaagctggtcaaagaccagatgccaccaggtagaatcccagcaaactcttcaatggtagatatctgtcaccatccttaggaggtaggtctgtggaagctcactataataccatttgcttaacagatatacaaacatggatcagatataatttcaacccacaaggagctcacagtctggctcttcttttgaggcaaaaagactaaagctgttgcctttatggtaagataaatctgccttggagtcaatccaaggtgatttaattactgtaggtagttgtaccaataaggcttgtatcccagagaactccatattgcatttaagcttgttagtaagccaggccagctctatttcctgtgaggactttaaaaaaaattgcattcacacatttaaaaattag

SEQ ID NO: 47 - DNA, 1920 bp, Homo sapiens
aaaatgataaaaaggaagattctttcactatatctgcatttccaatttctcccccaagaacgctttcctaacacctgcaggcagaactaaccactctgggcccctgtagctgttgtgcgtatgtttattattgagtttttctggcctttgcagttctttcagtgtctgattctccctctctctcagcttctttctcaagactgtgcatccttggaggtcagaaattgtctcatcctgccgggcgcgatggctcatgcctctaatcccagcactttgggaggccgaggcggttagatcacaaggtcaggagttcgagaccagcctggccaacatagtgaaaccctgtctctattaaaaatacaaaaattagctgagcgtggtggcacatgcctgtagtcccagctactcgggaggctgaggcaggagaatcgcttgaacccaggaggcggggaggttgtagtgagctgagattgtgccactgcactccagcctgggcaacagagcgagactccatctcaaaaataaataaataaataaaagacaaaataaattttctcatccttttttgtcatcttcatcacagctgcctctctaatgttcgttgaatgaaagggccattcccaaatctctgataagtcaagcatttttaggagagctaaaccagccaaatgagaccaggaagtgaagaaaaatacctttttttttttttttttttttttggagacggagcctcactttgtcacccaggccggagtgcagtggcacgatctgagctcactgcaacctccgcctcccaggttcaagcaattctattgcctcagcctccccagtagctgggactacgggcacacaccaccatgcccggctactttttttttgtatttttagtagagatggagtttcaccgtgctggccaggctggtgtcaaactcctgacctcgtgatccgcccgcctcagccttccaaagtgctgggattacacgcgtgagccaccgcgcccagctgaaaaatacctactttttttttttttttacagcaggaggtgtttctgcttctactttgctgtgacttctgtttctccaggcattcctggtatggacatttataccaggtgttttggtcattggtgggctctcagcttcagaggacacttggcttctctataccctatctttggtgacttctgcttgttggacttcagtcactgcagttcacaagtttcacactcatgaaatatttattgttaattaattccaatatttaattgattgcttctctttctcagcactttggaaacatgtttactacctagacattttcctacagtagatttttaattcttaacattttgatcttaagcaatttaccatgatacttggtttccatgagagatttaacagttggaactgtactgcccataagatgcaggtggggtcatggtatgtagttgggaactctacaaatggcagcccttcatgcctttgcaaaggctgcaggttggaaagctgccattacttgtgagggcgtccaaatgcttcctgtgaatggaagatgtgtttctgtgcctcactgtcttcactgtgctggattgctggctttctcagatgtctttatttgagtcaacctgtattccatctccccactcccacccagtcttgatcatctcatttgtgtgtatacaaccttcccctcacacacacctctttgcagagtttcgttgcactgggcgttgggaggagaggcgtcagagttgggtggaatcatttcaggctgactgtccagacatagctctcattagaagcatcagtaaataagctgaaaaccaacaacacgtacagcacagtctttctgtgtttgcagcttggaactgagcagccctcactgggtgcatttctaatcctttgtctcatcatttatatg

SEQ ID NO: 48 - DNA, 2014 bp, Homo sapiens
attttcatcaaagaaagtctagttgatatgcaattgttggcctaagtgttattgaggagttaattttactgttgaattacaccagaacatttgtcatgtgaaataactataaatacgactgattattgcctagtgtattacagttctctccagagacacaggaaacaatagggtctgtctatcggaatagatatcctaaaagtgtatcttttgaagagattgattataaggtattggctcatgagatgatggagcttaagaagtcccacagtctgctctctgccagatggagacccaggaaagctgctggtgtagtttgaaggcctgagagctgagggccagtgatgtggattccagtctgaaggtctgagaacccagagggctgagggcaggagaagatccatgtcccagctcaagcaggcagagggagggtaaatccaaccttcctttttctgtttttttgttctaatcaggccctcaacggactggaggatgcccagccaaagtggggagggccatctgcttaggcagttcaccaattcaaatgctagtctcttctagaaacaccctcacagacacacctggaaataatgtttaagatctgggcatcctgggggtctagtcaagctgacacatacatttaaccaccacacttagggaatatgaaaataacttagacattaaatttgattttggtgttgctgtaaagaatacagatcttaggcaccagctcgtaggaggggtggtaaacaaggaggacagcttttaccaggttgcctttggaagcaaaactctgctttgctgttttgttttcaagcggctgcatggccactgagcgagccctttcctgccatcaccacagtgccacttagtgaacagtttctccaaggttaactgtagctgctcttgttcagttaatatgtagttctggattaatatgccacatctgtcactttaaggaagaaaaagagcagttccgtttagagatcccattgctcctctaaggacagcagtcatttctaacaagcagagggaagaaatcttctggttccatttgtcctttgtgtgtgttgaaaaccttgacaacaaaacaaattggtactgaatggtttgaagaaataaacattaactcccctttagtatttcatttctagggtttccagccttggtaacaattaccaagaactttgctgtcatggggtacagctctaggctgctgacaggatcttcatactggaggagactatacttttatagccaattccaactgccccagagataacttggataaacactggctcctccactacctcctaatccctgctgggttttacactgtggggaggtttagacaacttgttttctttcccttttagcccttctctctacactcccctccagctgccttcttcccccacccccaaatgtaacgtgatctcctaggcctgctctgctgcttttgcagattcttttagtcttagagaaagagaggaaaatattaaccattggtttaccaattcaaagttaacaacattttaaacaaaaggagcttgtcaataaccagggcttgggcttttcttttatcagttcctcctacttggctgagtttacctcatcataaatcttatcacacagataataatttgacagctttagggtttttgcagcattgctattttctattgcaacaaagctgtaacattgctatttttgatgtatttgttttatagatatcttaatcttcaatattcagattaaaaacaaacaagacttagtgatttaaaattatttggtaaaaaggtaaagggacagagacatctcatgaaaacatggcaaaatctctttaagtttaattcaagcacttagagtttaataagaatatcccaaaccatttttgcttaataatatttctgtttataattaaaccttaaggtacagtgttgtaactggatttaagaatttagagttttgttgtttcttcgccatcagcgaaattaagatttaaaacctatag

SEQ ID NO: 49 - DNA, 2023 bp, Homo sapiens
cttgtaacagaatgctcttcgtatctttcaaaagcgtcaaaagctggatatggaaagtataggccaggtttgatacagaagtgtagtttggcagttttttcagtatccattgccactaattcagtattttgttagatctgttgatgtatggttttataactaaaattaaaaagatttgggtacagtttataagcattattcattttaagaggatttaagaggataagatcattttagactcaagagcagaatattagtaataataattagcttaaaaaaataaacatataccaatataaagaacagcacaaggcaagcaaatatctgggcctatattaacagacggtattcaaggatatggctagaatttccaaaatgcctaataatgtgtaattcttggcattaagccgccaatttgaatatggccctttaatatgaaatgctatataatgacagactttattatagtctgatccaaggcccctgaactttccaaaagggcaacaaaacagacagatactgtattttttcactagttggtactggtggcacccttttgagtgttatttttggcattacgtgtagaggttgacagattcaagacaacactaaacatgttagcagtcaccacacgcaggctgtccagcagaatgacagcgcttcccagatcctagaaagcatccagagtcactgcacccatcccctgggggccctgtagtcctgcatctccagatgatgggagctgcaaacttccctgatggtgccctcttggatgctcatgaggcctgatctggtaccacgactctagcagtaggtccattcaatggcagtaaaaatacatgttgtatgttgatcagaatttggcaggacacatgtggaaagttaatgacatcctggccgagaacccctgtgatatacactggttacatcctgtccaactggagtttttatgtgctgtttttggcagagccaagtgaagatcttgttacttagccattcctgaggtactgaagatacccgggtttttgtcattacaggataggctagaaagtagccagggtctcataaccaaggctttctctgaaacatataatgacaatgctagttatttgaccaaagatatccaatgctttaatccacttggaatttattcttgatgtgaagggtcagcatcatccactggtcgggagcctgatccttggagccaggcagacctgggttgagtccatctccgcctgtttccagctgtgggcaaggtgtctgacttctctgagcatctgtggggtttgtttgtttttaaacctgaagaattgggataatctgtttcctcacagaatcattacgcagatgcaatacagttaatgaaggtaacatggcacataggaagagcacaatacacgtcagctcttactcttcatggctagaagatgtggactaaacttccccctttacagttttgtgattaacaccatttatgaaagaaataaatgaaataaattccttttcctgtcatgaggggaacttacctgattttattgaattatttggtgccattgagttccttattgtttccctctgacctagatttctgggtgtgcgccagtaacacgactgtgattgttgctgctttataacattgtctgtggtcagtccaaacaagagtttaaaataattgaatgaaatggattttaaacaatggtccccccaccctcaccccgtggcactcggccaaaggaagaggaaaagttctctgttaaagaaaatgaatcagagaagaggcccagaccgtgcctccgaaaattctcattgtagggactaagtcctctcactctgaactcacacccgtctgttcgcagcctgacctcatatcctggtctggatgtgcggcctcaccggggtgtcgtgcgcacgtgtggttgtcctgtgggtgccagctctgacttcctccccagacacccactgcctcagccttaatcacaggacgcgcgttgagtagaaatgagaccagttagtattggtaact

SEQ ID NO: 50 - DNA, 1678 bp, Homo sapiens
tggaggataatagcgaaggacccacaaaggaaatatgaataaagcagcacaagtttaaataattgaatgtgagcaaaattaaagggaacgtttgtcacgtctgacatgctccatcctcctgtcccccccacactgaaccgtctccaagaaccttccggagagcccacagtgtgaacagtaatgaatgctccatagctggccgccttgcactctagtgggaactatgatgttgggcacaagtgccagcaggaaggtgggaagcttcccggggatgtttttcctggaggtcaagtccccccttgggctgtgaagtagccggtactggggttcatgggcatttcccttccctgactgttcgccagcgtctggcacagcaccagcagcccctggaagtctaggccagatatgccatgtccgagaatcttttgtaaacatttttcatcagtgactcacagctttgagaaaggattatttttatataaaacgatctttcaattttactttaaagacccaaaccattttcttagaatactgtctaaacaagttaatcatgcacagatccagtgaattctgtggcctggttcttataaaatttccaaataattttatactgtcatagacagagccagagctttttagaggtttgaggcattttttagatgtattactgttctcggtgctcaactagctaattagtgattttttctgagtttagttggtgagtggaaacctttttgttaacattatgacaaaataacaatatggttttaagtggagtgagaggcacttttgaagatccagatcttagatccagatcttaaatctgtttaaagtatgactcagaaaggaggctgcagaaaatgttcactaaaaaaatttaagaataatagcagatgctaaaatttatttcccaagacaatagccaaaaagatctgctggaagaacagaagaagggaactagttggggcatcttttttttttgaatgaagccttcagccttctttaggggaatcttgcttcctgacagagggaccggtggaaagtttgtgtcttaagcaagaaagatttaagtacattctgcaactttggccttgtaagctgtgatcatttttaaggttgacgagcatagttcactatgaaatgaagcaagtaacttggcatttatacattgtgagtcaattttgacatcagcctggattgggaattgactggaaggttttggtgttggactgtggctacacttcagtgtctcggtccagaggcatgcatgagcaatacttccctttgggctttagccattaatttgtggaatagagcaagaactggagaggaaagtcgagagactgccttggatcgcctgacgtcctgttgaatcaaaaagcagtgggaggccctttccttcctaacaaaggcctcatcctcttgcataacattcccagcatctgtcgacatgttcgggaccatcccactttaacccacacttcaagtggatggccacctctgggcggggatctgcattctgcttattccaggtgttttccaggccacttccccgattatgtaactttgatcaaatccagatgcggcagaatgtttgatagaagaggtcaaatggcatttgagaagaaaagcatttctgtattcatgactttggtttaatttcctgtgtgggcctggt

SEQ ID NO: 51 - DNA, 1352 bp, Homo sapiens
tttcttttttctgttcccccctttctcttccagaagcccttcagcggccagtagcatctgactttgagcctcagggtctgagtgaagccgctcgttggaactccaaggaaaaccttctcgctggacccagtgaaaatgaccccaaccttttcgttgcactgtatgattttgtggccagtggagataacactctaagcataactaaaggtaaaagggttgtgggcagctagtggtggttgcaggagatagaaatctgggaattgcggtttgacctaccaccctttgctcgttaaaggagcagctttgaaatctggactgcagggatatccaaaacaacaactgcatgtttctaagggagtcgactctccttagaggagttcttgtacaatagccctgggcaaaaacagaacttgccctattttttatactgaaaaggacagctggacaaaatactgaacgcaatttttcccctaagaaaaagcattatttccctaaaatgtcttatattaggaacagagcacttgaataaacataattgatttataaaaactgaggctatacacttacctatctgttcagtacaaacaggaagcttcaaatgtaaacgtgaattctcatacacttataaatgcatatctttatgtggacttgttaaaatgaaattggtatttaggaatttggagatttttagtagttacacaagaatcaatgaaaaagaacgaagctggtttccaaagctgatatgtctgatttggttcctttcttctcaggtgaaaagctccgggtcttaggctataatcacaatggggaatggtgtgaagcccaaaccaaaaatggccaaggctgggtcccaagcaactacatcacgccagtcaacagtctggagaaacactcctggtaccatgggcctgtgtcccgcaatgccgctgagtatctgctgagcagcgggatcaatggcagcttcttggtgcgtgagagtgagagcagtcctggccagaggtccatctcgctgagatacgaagggagggtgtaccattacaggatcaacactgcttctgatggcaaggtaggggacccttggcagggggcgctgatgggcccagggcaggggaaccagaggtcctgctgtcggattgataaattattgcaagaaagctcaaccaagaagatgtttaaagaatctttcaggtgggagtcattccattagccttatgaagaccctttattgaggatccgttctgtgatattacaagttcctgggactggtatgattctcttattgtcttgctagagttttgttgttagcaagttacttaaaataggaggaatatctgttgggttttggacacatt

SEQ ID NO: 52 - DNA, 1920 bp, Homo sapiens
tcctattgcccatatctgatgctttccaccactgcagaattctttagtaccaacactgcagtgtgcgtgacggacaaaagagcctgttatccctgtgtgactagacgtgggcctgtcagcttgctttttgggttattgttcttatcccagaggtggagctgcgttcttccattctgagggacgtacttcaggacattgggccctttgaaagagccttcagaccacaagggtacctttctagtgaatcagaacaccagggtgcaccgcccatggggggtgattttctggagcagacagcttgcttcccatgtgtgctatttatccaaggcaagtcatgctgcaccgagatagtcacttgaggtttgcaccgaacaggataatggtttcttttccctagagctgtttaatcagcaaccttggaacagatgcaggcaggcatgatctagtgtgacagctcattagctaggggttgatctaaaatactgttcaaatgggcaaggaaaggcctgcgtatgggatatgtgatttgcagaatttgagattcatccaaagagggagaatctgcctaagatgcctctgtctaaaagctagtatgtgccaggtgggtttgtttcattccaggtagagcacagggagcttatgtgaccaggcagtgtccaccattgggcaacacatcacacttcccttggcgtcttgcctcctccctccccgtctggcacagactctcccatcagccgtttgggcacctggggacttctgagcccacagcgtcatccagcagaccgtctgcggaggttccttcctgtgagggccgcactcgagggggtgtattgggtgggatcgtatcactggaatgagtgaacatcgttagagggagctcccacagctatgcgtgtgaccgtgtggctcgccgctgaaaaatgctgctcacatagcagaacttcgatgcaatcctttttggatttctaaggggaaattttaagaccgataggaggaataggctggggttgaataagtttggttcttatttttaaattagctcatctttagaaaacaactgaatttagaagattcttctgtaaggccccaaaggatttctttctgcctccccgctcttggctcttatttgtgtctctcctcgtgttctgagcttttcagcagcccttgtgggtcatcagccgaggaccatcagctcggggcccagagctggggactgggagttatgagctggactcttgaaggggccaatactaaaccgagccgttgccatttcctaggagccttgacaggctcaaacatctctgggtacccggggatttgactgtcattgttctgatcctttcccaaagttgtaaccctctgttgacatagcggaattgaagattgatttttcttcaccaccttctgcctaaagttcttagttctgaatgtgtccacacctcattgacttctatgagatgcccctgtcacgttcctcgattccttctagtccttaatagagtctttccttttcttgaaagaaatttgcccagttgacatttattttcatcgtctgctgaagtgacagatccaaggccctaagcttcagcagagttgcaggaagggaccatttacacagcctcttagatgtttaaggtttacccgccctgacagtggctcagcaggcgtaggcctcctggtgaaaagccgagcacatggctaacctgctctggtggaggggctttggaccgttcttgtgtactgcgaggcttgccttcctgctggtgtgtgagcagctctcgggggaacttgcttcctggctgagcaacctgtaaacagtatgtctgaggtgggactcccgggcccaaagcagccaaaggttgcacaagtctaagctccgttaggcctgtcagtgtggctgtcaaaagaaacgctgtttct

SEQ ID NO: 53 - DNA, 1449 bp, Homo sapiens
acgtctcctccgagagccgcttcaacaccctggccgagttggttcatcatcattcaacggtggccgacgggctcatcaccacgctccattatccagccccaaagcgcaacaagcccactgtctatggtgtgtcccccaactacgacaagtgggagatggaacgcacggacatcaccatgaagcacaagctgggcgggggccagtacggggaggtgtacgagggcgtgtggaagaaatacagcctgacggtggccgtgaagaccttgaaggtaggctgggactgccgggggtgcccagggtacgtggggcaaggcgtctgctggcattaggcgatgcatctgcctggaagtctacctcctgcctgctgtccgagggcttcattggcgccacggaattgacttttccgtcttatatcattcctgtgtctttgtaggagtggaatcattctcatagtccgagtgtgtttccacatatggtgagagctgacaagcatggaggggttttggtgtaaaaagattagtcatttggagaggttttctcattttatggcaaggttcttttaaagccgtggatttccatgctgttcgtgcggcatggagatcacttcctaccgagagttaaggaggaaaaaaagatctctgagttttgaaagaagatttaaccaaaatgcatttgactcttctgtggatttttgttggctgatttggaaggcaggtgccctgggcatccccagtgggttccaattctgcagctgcccagactcctgcaggcagaggtggaagtgtccccgctagaaaggcatccaggaaactcgcttttgaccaactcagatacagtctggtctttcttgttaactgggactttaccctctccactaatgaatagtgtttgtagtttccaggcaggtttttttcttcttttgaagttctttgaaacccttaggacgccaagggaaggaagttttcattttcagccctttgcattcttcaaaatgtgatccaggcttttccctgtggcgagggtgtcccctagtgttgacttacattatttccacttgttttaaatgaactttgattaccttgacctgtgcacagaaatcaagagaggcagcccctttttagagctgttagaaaagaactgaaacatccacctctgggaaaaatagagtttagtttgtgcatgtgtctcagaagtcaggtgcacacattgagactggtgcagccacatgcctgccttttagggactccttgactgacctgatgccttcacccaaaggcatagtgaaatgggaagtatgatttctgactggtatgaagtggctgctttagagaaaagatcacattctttagtcctagaaaccaaaggtggcttcctgatgctcttattcagcacgtgcctgtctttgaggcaggactggcactggggtgggggcatggtttggggttacct

SEQ ID NO: 54 - DNA, 1304 bp, Homo sapiens
tggggttttacaatccatattcctgccagcatctaacgtcttttcaaattcttaatgtctataacaggacatgatgacattcatcgttttgacttgttgcagcaaaagatggttagcaggattggaatgttgctttcattctagacttttccttgagaactgctagccccgtattgctagccagatctcatggatgatctgacttgggtttcatctgtccaggttggcagtggaatccctctgaccggccctcctttgctgaaatccaccaagcctttgaaacaatgttccaggaatccagtatctcagacggtaaagtacccatcccggggtacctgcagtggggtgaaagggcagccatgtgggactgcagcctgggtcattcggttcacttcctggtgaaagttcacagaccagcctgtcctgagaccagaaagctgggcagaggtgtggagtattgtgctttcttgtctgctgcagccctgcagagttctaagaaatgctaagggctgtttctccggtatccacgtgccttttctttagttgtatgcagatgagcactgttaccttacaaagaaagagaaccaccacaccaagccaacaccagtactgatggctgctggatttttgtttctgtccctgtatgattcttagaagtggaaaaggagctggggaaacaaggcgtccgtggggctgtgagtaccttgctgcaggccccagagctgcccaccaagacgaggacctccaggagagctgcagagcacagagacaccactgacgtgcctgagatgcctcactccaagggccagggagagagcggtaagtcccccgcttcccccaaccccactgctcttcccttccctgccagaggctacattcaggccatcataggccaacgggaagctgtgaatggagcccgcacagaagggcagccatggcctttgtcaatggttcagcttcggaaggaggaaggttctcctctccccacctgcctcctatcccctccctctgagagtccccgaggagcataggctccagcagtgagttcagtcctgtaggcagaggtgcttctgaagcccgccaaggagctagcccatctcccacctattacccgcggcatctgtggttgctgtctcagagcagattcaacaatagtaagcaccaggctgcgtgacaagcagctcacggtgaaggcactgatgtgagaagctcgctgcagccaggtggaaccaggacacgcacatggacagaacccgtgtcctggtggtctctgggaagagcatctttctggtgccattgcctag

SEQ ID NO: 55 - DNA, 3965 bp, Homo sapiens
gtgcagacagccccaacaggaccaggagagaactgtgcccagggccggatttctccctccacagtggaagagaagcagccaagtattacagccagcccagctccttgggccgcagagatcatctcaggaggcctttctaaacggagtgccctggggaagcaaactctaaacgtcctcgtacgagaagacattaggtgagaccaggctgaccacagtgtccctgtcagcactgccctcgtccctgggggtcacctaatgtcttgctcccctgcccccacactccagttgatatcactgctgtaatcagggaaatctctgagctctttttctgggagggcatttccgaggggccaaggagctgcggattggaggagcaccagcagcacagggcatgcccctgctccctacccagaagctggaaagtaccatgtcaggtttggggtcttcagtgaaatctgtcaagcagcgtctttggcactggggcaaagttaggatgaggtggcttccctcttgattactacagcagctgtctatggctgactgtccccaggagcctgttttgtttggggttttttcttaaatatttttattagtatttcaaacatacaggaaaagacaaatgttttccattcatcttgatagctaaatacctttagatctacacaccaagatgaagaccgccttgtgtcttggataaatgtaacgagcagatgctggcagctcgcaggtgctctgggctggagtagttagaactgccgggccaggtggagtgagccagcactgctcaggggagcttcatctctctgattccaaaataaatgttttctggagtctcaacttcaccctcctggagaggggtaatcttatctgtggaggagagagcaagggctgagggggcgctggggtggcatgagaggcccaaagaccttgacagacacggtgggcttggccgcggggcaccgggttaaagaggaggcttagccaagcccagcgggagttgatttgacagcagtgcccttagcagcttgattgttcggattttcagggctactgagctcaagtgtacaagcaaactggaaagaatagctttgttgggttttttaaagtgataaaagcataatgacagcatatccactgctttgaaggcatcccccgcccccgtgttctttatctcaggtttttccatcaaggttaatctaatcctgctaaattaacaaccagccagtgcatccccaaagagcctgtggaatgtgcagggtggctcagcctcggtgttctctaaagtactggctgtgggtggctccttgctcacttgcagaagttggcaagtgacgagtggccaggggaccgtgcgtcagggcgtccctctgccctcagcctgctgtgtttcacccggtctctggtgagcacatctctggctgctttgcgtgaatgagccaagggagggatagatctagcttactgcctccccctcccttaagccaagcagaatggggtgtgtgtgcacacctgtggtgaacgaatctgtccgttcaccctgtgccagggccgtccttacagcaaggaccccggggatgtgtccgtccccatcagtgtcatgttagcaagcagtgacaacatccctttgcaggaggcatcctgaaccactctgtcctcagacagtggcagagcccaagagaacaatgtgccccacccctccaccagcctcaggaatcattgtcttgtccccatcacagcagccctaagactcagggcacatgcgccaagcctggggggctagtttctgtgtgggaagcgatggggaagcggtgaggagctcctggagaaggtggcagctttcataccgggtgatgttctgactctggtgttctctcccatctcagcacccattctgctccccagtcaggttggttctttgtggctcagatctgtcaccccttaatgaagtggctttctggctgccaaggattgagagctgctactgaggagtataagtcactaatagcatggaaaacactgtgaaatactccaaggtgccaagctgggcccagcccagtgtggttctaaaaggctaataaaaatccaccaattaattgtgacagctcaatgggaaattattcaattgtgaacaggggcaagctgcagctcgaaaggaggaggggaggggttgccatagtaacatcaatgtaagttctcatctcagcagcggaagccagcccgggagtgagcagcatccgaccgccgcctctgacacgggatgggatgcaggagacaccaaaggcgcgtttgaaacagatgctttgcctggccccgggcctgcagccactcccggctgagcgtgggctctccccggggcagagaagttgttttccgaatgttccttgctcttaggaaacctgggaaggagcagccgagtggaagtgaaaagcacatgtgctgtgttcctccgcccctttgaccgactgccggttacagggatctagaggaggggtgtttgggtccagtcaacaggagctccatctcccgaaaggcaaggcacccagaactcagactgtgggggaggccagcattccagtatggttttgcagttgtcacaacttttatttgaaaagatacacacgacatattctgattttgaacatgtgaaatgcaaccttgctatagcaaaaacgggattccttcccaacgcatctcccaggagactcctggccgggctaacactgggccgcggagaagggctgcggtcagaggggcaggcaaaccacagcaggggcttcttgccagggggatcttgtgctcatggcatggagaaggggatcgggttcttttttcccatttttaactttcagaaccatcctctgtacccagtggaatgcactcatttgcactctgatgtcagccgcagtcgtgcctatagagactgtcacaactttgattacccaactgtaagcactcagcccgctgcctcgctctgctattcacactcatggcccagccacagcctcagctccgtgcccctggggccagggggctgctcggagtcaaagccccaggggaagagagaggctgggacgaccgaggctccaagacagcctcctttttgacactgcctagtttttcgcttcagcaaagttggaaatcaaaagtaagcacacacctaacctgtcctaccatggatcgttcatcgtaaccaagcctacatcatctgggtgtcgtggtctttgagactgggggagaaggcaggagtgaagacaatgggggtgagtccaagaagcaaatccttccaaggcgtcctggcccttcaccgccgaccgaagcggaagctgaagccgcctttcttcctgctgtagccattgagctcctcagccaggttccctaacgggccgctggtcttctcccccgcagcagggaggaagccggtggcctcactgccttcgtcctgcctcccgaagcggaatctgcagccagcatgctctctgcccgatgtctgcagccccctggctatgacaagcagggcctgtggctgtgaagctctcagccaccgagaggaaccccacacggagtggggtcggggccccatggccaggtcggcccagcgttctccagctccgaggccacccatggcgtctgtgggctctcttctgtccagtagagggaagcaggcgcccagcggcaggaagaggaagtagatcagggggtaaggccttaccatctgacccagaggaaagagaggcagagtgacaggctgcacacgtggccaagcgcaactcaccaaaatgtttccccgggacaggctggcagcgtagatgtgagcagggggctcagctgagcccggcttccgagcagtgctgggactaggccactgttttattagcaggatcaggaggtgattgtgccagttaggccggttcttctcctgcagtccccacgatctgcgtgcctgggcagcttagcaccgtaaatcc

SEQ ID NO: 56 - DNA, 1819 bp, Homo sapiens
gatctgaaacccagcctcctgtaatgaacctgccttggtaacacttgctcccttgtctggcaaagaaaacctttttgacaatgaccgcgggggagctggagctggcttgtcctccgcagagtcaaactgaggctagactagagagcaccggccctggagaagacagtacaggagtccccagagccctttccagaaatggctccctcgaacacatttcaaagaagcgagctcagccaggaagcttttaaaaaaataatacatgcaaccccactttctacccaaatccagttcttctaagctttcgtcccccagggatggagtgacctccctcatgctgccaggaaaacctttccatcagggcgcaggcagagtgggggcttccacgaggtgactttctgcagcggcccagcccattccctcctccccataggaagcactttgctgactgcgatgtggaccagggaccgttgcatcctggtggataaatccacccgggagtggcctctgggtgtctagaaaggagacagcctgacagagcaggccctggagtggcccttcaccccttttaggggttcatgcaccccttcaagaatctggtagaaagtggggatgctcatcacgggacaggcggccccagcgcgagtcagggcttcaggccccacagccaggaagggacaggaaaagcacgggtgaggctgggtcccagccctggcagggcagccgtgaccaatctgtgctgctctgggctgttggcaggggaggcactggtgtcccctctccgggcactccctccctgtgcttctgtgtgccctctgactgcccatgcctggctcctgcctgggcagggcctgagctggggttcctgctggggacagggcagctatgctcaccgtgtggctgggactgctcccaggaaggctggctggtggatcgctgggctccggggctgggctgggcagagctgctctgggtcctcgtccaggaggcatggcccctgggctctccctgctttatatggcccgcggtgcgcttgctgctctgccgactgcctgctgcgcattcctgaccctgggattccattggggacgctgttgttgaagaggggcagtgctgaccgcgttgataaaaacaacctcacacaggatgtagtctgatgagagggcaggcgggctgccctttggaggagagcagacagcatcattaactgcaaattgcgggcacagaccctcgagtcccttggcgggggttccaagcccacccttcaccctaagggtcctgcctttgctgggttggcacctcacgctccggagaggacatggggtgggtggacatctacccgacacacctactgcccagcttgcaggatggctttcatgggcaggaaagccacagacacccatgaggcccgtgtttcacaggcaccgggctgcgcggctaagccaggtgcacctccccggcaggtggagccctcagcggcctgttacccaggaaccaaccaagggggcacggcagatgcccaggacagcagtggagcatttgcctgtggcccccagcccctcccaccgcataccctgggtggccccctactgtcaccgagggtcacctctgggaggccagcaggaggacccagcctctgctccttgcccggcagagattctccctccactgagagcaggcaggggggtgatgaggcagccccaccccaccactgtcaggaactgagcacagagggcctcccccattccaggggccctcacccagccgacctacccctgcatcccggctgctgggggatcagaagtcatgggaatagagagcc
